United States Patent Application Publication US 2007/0294782 A1 - sequence listing, part 3

SEQ ID NO: 8288 - protein, 589 aa, Pseudomonas aeruginosa UCBPP-PA14
MCGISGEFRFDNQAADLAAVERITHHLAPRGPDAWGFHAQGPIALGHRRLKIMDLAEASGQPMIDPDLGLAMVFNGAIYNYPELRGELESLGYRFFSGGDTEVLLKGYHAWGADLLPRLNGMFAFAVWERDRQRLFLARDRLGIKPLYYSLDRSRLRFASSLPALLKGGDIASDLDPQALNFYLNFHAVVPAPHTLLEGVKKLPPATWMSVDLDGSCEQRTWWTLDYGPRPDERELTLDDWQERVLDGLREAVAIRQRAAREVGVLLSGGVDSSLLVGLLHEAGVDNLLTFSIGFEDAGGERGDEFQYSDLIAERYHTRHHRLRIGEHEVIEQLPAAFRAMSEPMVSHDCIAFYLLAREVSKHCKVVQSGQGADELFAGYHWYPKVDGADDAFAAYRAAFFDRDHEEYLATVGERFRVEDVAGRFVRDHFASPGAEAAVDKALRLDSTIMLVDDPVKRVDNMTMAWGLEARVPFLDYRLAELSARIPARFKLGDGGKQVLKGAARKVIPSEVIDRPKGYFPVPGLKHLQGRTREWVRELLLDPSQDRGLFQPAIFDRLLSDPDGDLTPLRGSKLWQLAALNLWLSEQGL

SEQ ID NO: 8289 - protein, 216 aa, Triticum aestivum
  misc_feature (204)..(204): Xaa can be any naturally occurring amino acid
MRRFLTDRARRAVAASLRGATRPAAPSPAPAPAAALSRPSPSAPSAMAAYMARAMSTSAAGTPPVSLDTINPKVLEFKYAVRGEIVTHAQNLEQELHKNPESLPFDEILYCNIGNPHSLGQQPVTFFREVLSLCDHPALLDKSETHALYSSDAIERAWQILEKIPGRATGAYSHSQGVKGLRDEIAAGIAARDGFHASGETSFXTDGASPQSHDDA

SEQ ID NO: 8290 - protein, 551 aa, Mesorhizobium loti MAFF303099
MAAKDVKFSRDARERMLRGVNILADAVKVTLGPKGRNVVIDKSFGAPRITKDGVTVAKEIELEDKFENMGAQMVREVASKTNDIAGDGTTTATVLAQSIVQEGHKAVAAGMNPMDLKRGIDLAVSEVVAALGKAAKKIKTSEEVAQVGTISANGDESVGKMIAEAMQKVGNEGVITVEEAKTAETELEVVEGMQFDRGYLSPYFVTNADKMVADLEDAYILLHEKKLSNLQAMLPVLEAVVQTSKPLLIISEDVEGEALATLVVNKLRGGLKIAAVKAPGFGDRRKAMLEDIAILTGGQVISEDLGIKLENVGLNMLGRAKKVSISKENTTIVDGAGKKAEIQGRVAQIKQQIEETTSDYDKEKLQERLAKLAGGVAVIRVGGATEVEVKEKKDRVDDALNATRAAVEEGIVAGGGVALLRASANIKAAGANADQAAGINIVRRALQAPARQIASNAGAEASIVAGKILENKGATFGYNAQTGEYGDMIAMGIVDPVKVVRTALQDAASVAGLLVTTEAMIAEAPKKESAGGGMPGGMGGGGMGGMGGMDF

SEQ ID NO: 8291 - protein, 211 aa, Bacillus halodurans C-125
MSWFQLPLGPLQTNWYIQTNDQGEGIIFDPGGEVEKLITWLRDRQITPLAILLTHAHFDHIGAVEDVRNTFHIPVYIHENEKEWLIDPQRNGSSLFIPGSSIKAREAEHLITGEQDLSIGSFSYQVLETPGHSPGSLSYYAKEDKIVFSGDALFAGSIGRTDLPGGDHQLLLDSIHDKLLELPEDTTVASGHGPTTTIGHEMDGNPFLSGF

SEQ ID NO: 8292 - protein, 703 aa, Ashbya gossypii ATCC 10895
MAGVPDNVKGVVELDPWLAPYGDILSARRFLADKWRHDIEHAVPGGRRSLVEFARDAYKSYGLHADAQSKSITYREWAPNATRAFLVGDFNGWDETSHELQNKDEFGVFTGVFGPGADGDFMIPHDSRVKVVFELADGSRIHRLPAWIKRATQPSKETAKEWGPSYEARFWNPASPYKFKHERPRLDPNVESLRIYEAHVGISTPEPRVGSYSEFTKDVLPRIRDLGYNAIQLMAIMEHAYYASFGYQVTNFFAVSSRYGTPEELKELIDTAHGMGIQVLLDVVHSHASKNVSDGLNMFDGTDYQYFHSISSGRGEHPLWDSRLFNYGSFEVQRFLLANLAFYIDVYQFDGFRFDGVTSMLYHHHGVGERGAFSGDYNEYLSDHSGVDHEALAYLMLANDLIHDMLPANGVTVAEDVSGYPTLCLPRSVGGCGFDYRLAMALPDMWIKLLKESKDEDWSMGHIVYTLVNRRYKEKVVAYAESHDQALVGDKTLAFWMMDAAMYTDMTVLKELTPVVDRGIALHKLIRLITHSLGGESYLNFEGNEFGHPEWLDFPNANNGDSYQYARRQFNLVDDGLLRYKHLYAFDKAMQEAEGKHKWLNTPQAYVSLKHETDKVISFERNGLVFIFNFHPTQSFTDYRIGVDEAGAYRIILNSDREEFGGHRRIEEENSVFHTTDLEWNGRRNFIQVYLPSRTALVLARNP

SEQ ID NO: 8293 - protein, 448 aa, Clostridium thermocellum
MSKITFPKDFIWGSATAAYQIEGAYNEDGKGESIWDRFSHTPGNIADGHTGDVACDHYHRYEEDIKIMKEIGIKSYRFSISWPRIFPEGTGKLNQKGLDFYKRLTNLLLENGIMPAITLYHWDLPQKLQDKGGWKNRDTTDYFTEYSEVIFKNLGDIVPIWFTHNEPGVVSLLGHFLGIHAPGIKDLRTSLEVSHNLLLSHGKAVKLFREMNIDAQIGIALNLSYHYPASEKAEDIEAAELSFSLAGRWYLDPVLKGRYPENALKLYKKKGIELSFPEDDLKLISQPIDFIAFNNYSSEFIKYDPSSESGFSPANSILEKFEKTDMGWIIYPEGLYDLLMLLDRDYGKPNIVISENGAAFKDEIGSNGKIEDTKRIQYLKDYLTQAHRAIQDGVNLKAYYLWSLLDNFEWAYGYNKRFGIVHVNFDTLERKIKDSGYWYKEVIKNNGF

SEQ ID NO: 8294 - protein, 512 aa, Arabidopsis thaliana
MANKYVSSVLKSLLVLLHLVFLSKQHVDSASIVKSLPGFEGQLPFELETGYIGVGEEEEVQLFYYFIKSERNPKEDPLILWLTGGPGCSAISGLLFENGPLTMKLDVYNGTLPSLVSTTYSWTKTSSIIFLDQPVGTGFSYSRTQQFNKPSDSGEAKRIHEFLQKWLGKHQVFSSNPFYVAGDSYSGLVVPATVQEISKGNYECCNPPINLQGYVLGNPLTDYTTGSNSRIPFAHGMALISDELYESLKKTCKGEYTNVHPRNTQCLKFVEEFNKCTNRIFQQLILDPLCETETPDCYIYRYLLTTYWANDATVREALQINKESIGEWVRCYYSIPYNNDIKSSMPYHVNNSISGYRSLIYSGDHDFEVPYLGTQAWIRSLNYSIIDDWRPWMVKNQIAGYTRTYANKMTFATIKGGGHTAESKPEEASIMFQRSFVEAPLGQWLTKGSLMLLQQDVWGSSPNYCDLLVDLQINGGKCAGDLQRCTIMDLIRKKKTKRSFSSILDWIKVARF

SEQ ID NO: 8295 - protein, 653 aa, Parachlamydia sp. UWE25
MYKFLICLICLTTFVLEAKSPDLSPKEVTFKANEIMKAHASQKQLSPTLTRRILNNYLENLDPNKTYFIESDIYEWTHPTDELLTNIIDDYNNSNFSTFESIHTALIKAILKRRQLENKIDYQSLPKNVRAEEFKDIPWVQTEEELIERLKRIRALQIETAAKLNDHMKENALQRIGKRQAKYEEEALNPKEQEKQPLILSNVLKATASALDAHTAYFTPGEAAQFMINVQQRLFGIGAQLRDDINGFTVIKIIEGGPAALGKELKLKDRIVAVNGEPVVGMDITDAVDLIRGEEHTPVILTVIRETTSTAGEKTEEKLDVTILRGEVILKESRFKSSYEPYGNGIIGYLKLYSFYQDRDSSSATDLEEEINKLKKNQNMFGLILDLRYNSGGLLSQAVAVTSLFITKGIVVSIKDENGKIQHLRDLDGTSTWDGPLIILVNRMSASASEIVAQTLQDYGRAIIVGDDHTYGKGSYQTFTLTTTEHEQVNPQGEYKVTRGRYYTVSGKTPQLSGVLSDIPIPGVLSESEIGEKYTKYPLENDHIKANFDDDLSDVPFLQRDKIRKLYKFGLQEKLDTYHPYFEVLKKNSSKRLENDPNYQNMLKEIRKKENSDIESMEDFGQNDLQLEEAYKIMKDLLIMMQEKGIPLISSKL

SEQ ID NO: 8296 - protein, 205 aa, Oryza sativa
MVQPKKKFRGVRQRHWGSWVSEIRHPLLKRRVWLGTFETAEEAARAYDEAAVLMSGRNAKTNFPVQRNSTGDLATAADRDARSNGGSRNSSAGNLSQILSAKLRKCCKAPSPSLTCLRLDPEKSHIGVWQKRAGARADSNWVMTVELNKEVEPTEPAAQPTSTATASQVTMDDEEKIALQMIEELLSRSSPASPSHGEGEGSFVI

SEQ ID NO: 8297 - protein, 550 aa, Wolbachia pipientis
MTNVVVSGEQLQQAFREVAAVIDSTVAITAGPRGKTVGINKPYGAPEITKDGYKVMKGIKPEKPLNAAITSIFAQSCSQCNDKVGDGTTTCSILTSSMIMEASKSIAAGNDRVGIKNGMQKAKDVVLKEVASMSRTISLEKIDEVAQVAIISANGDRSIGSNIADAVKKVGKEGVITVEESKGSKELEVELTTGMQFDRGYLSPYFITNNEKMIVELDDPYLLITEKKLNIIQPLLSILEAVVKSGKPLLIIAEDIEGEALSTLVINKLRGGLKVAAVKAPGFGDRRKEMLEDIAALTGAKYVIKDELGIKMEDLTLEDLGIAKNVKITKDNTTIVSENKVTNRVKARIEQIKSQIESSTSDYDKEKLRERLAKLSGGVAVLKVGGATELEVKERRDRVEDALHATRAAIEEGIVPGGGVALLYASSALDKLKGAGDEEQIGINIIKKVLNVPIKRLVKNAGLESAVIIDYLIKQNNKELIYNVEAMNYVNAFTAGVIDPAKVVRIAFETAISVASVLITTESMIVDVPSKDENASSPMSAGGMGRMNEF

SEQ ID NO: 8298 - protein, 629 aa, Aspergillus nidulans FGSC A4
MASQSPLFQPLRIGNVTLNHRVVMAPLTRLRADAKHVQLPMATTYYEQRASVPGTLLISEATIISPQHGGYPHAPGIWNSEQVAAWKKVTDAVHTKGSYIFCQFVAVGRVADPATLRADGGYEVTAPSAIPLDAENGVVPKELTEEDIQALIQTFVTAAKNAIAAGFDGVEVHGANGYLVDQFLQDVTNKRTDAWGGSVPNRARFGLEVARALVEAVGADRVGFRLSPWNTWQGMKMADPVPQFSYFAEKLKELKLAYLHVIESRVINNVDCDKTEGIEFLLEIWGKTSPVLVAGGYNPANAEAAFTEYKDNDIAVVFGRHFIANPDLPFRIREGLPLNKYDRDSFYAFMQEAGIGAATAIAFAAAGCTRIAITDLPGSGLNETHMKILAATSNKPNVMSYPGDISDESFVNSFIDQVFSAFKRIDYVVNCAGVLQKEFLRSTEVSCEQFDFINGVNYRGTWLVSRAALRKMVSQEPLSDGIEDGEWRQKSRGSIVNIASQLGVVSRAGAAAYCASKSAIIGLTRADAIDFSKDLIRVNCVCPGVIDTNMTTGDPETKEALAPAVQIAPMGRMGDPREVADAVLFLSSSRASFVQGHALVVDGGAWEGVSLQTSPLIRCGMSSTFRVSS

SEQ ID NO: 8299 - protein, 434 aa, Bartonella bacilliformis
MIRKVIFFVAGVFLSASLIVMAQSITTNNEQNTYKQLARFGDIFERVRTQYVTIPDDQKLIENAINGMLLSLDPHSSYMDAEKAKDMRDSTKGEFGGLGIEVTMENNLIKVVSPIDDTPAAKAGVLAGDFISKIDGKQISGQTLNEAVDQMRGPAGTPITLTINRFGVDKPLDIKIVRDIIKVKAVKYRVEGDIGYLRLIQFTEKTFSDLQAAIKDIQSKIPTDKLKGYVLDLRLNPGGLLDQAISVTDAFLNKGEIVSTRGRKQNDVMRFDAKLGDLTDEKPIIVLINGGSASASEIVAGALQDHRRATIIGTQSFGKGSVQTIIPLGENGALRLTTALYYTPSGTSIQGIGITPDIVVEQPLPEKYKGYDVTLGESELRGHIKGKQESDKGSGSAAFVPRDPKDDVQLNEAYKLLRGEITHAAFPPDPNKVF

SEQ ID NO: 8300 - protein, 195 aa, Poecilanthe falcata
RVMAYKFHEDDHGEVVSEIRRSDLEPYLGLHYPAKDIPQAARFLFKQNRVRMIFDCHAKPVNVIQSEELRQPLCLVNSTLRSPHGCHTQYMANMGSVASLVMAVIVNGNDTTRLWGLLVCHHTSPRYVPFPVRYACEFLMQAFGLQLYMEIQLATQLAEKRILKTQTLLCDMLLRDAPFGIVNQSPNIMDLVKCD

SEQ ID NO: 8301 - protein, 546 aa, Xanthomonas campestris pv. vesicatoria str. 85-10
MAAKDIRFGEDARTRMVRGVNVLANAVKATLGPKGRNVVLEKSFGAPTITKDGVSVAKEIELADKFENMGAQMVKEVASKTNDNAGDGTTTATVLAQALIREGAKAVAAGMNPMDLKRGIDQAVKAAVVELKNISKPTTDDKAIAQVGTISANSDESIGNIIAEAMKKVGKEGVITVEEGSGLENELDVVEGMQFDRGYLSPYFINNQQSQSADLDDPFILLHDKKISNVRDLLPVLEGVAKAGKPLLIVAEEVEGEALATLVVNTIRGIVKVVAVKAPGFGDRRKAMLEDMAVLTGGTVISEEVGLALEKATIKDLGRAKKVQVSKENTTIIDGAGDTAAIESRVGQIKTQIEDTSSDYDREKLQERVAKLAGGVAVIKVGASTEIEMKEKKARVEDALHATRAAVEEGVVPGGGVALVRALVAVGELKGANEDQTHGIQIALRAMEAPLREIVANAGEEPSVILNKVKEGSGNYGYNAANGEFGDMVEFGILDPTKVTRSALQNAASIAGLMITTEAMVADAPKKDEPAMPAGGGMGGMGGMDF

SEQ ID NO: 8302 - protein, 168 aa, Oryza sativa (japonica cultivar-group)
MKNMVFEKKKEKKEKEKCQQSCRSCSHFTCLVAQIAVSTISSLLFSTEIGLGLSGFGVLFSFLGIIMLFDKGFLAIGNILFVSGVSLTIGPKSTVQFFTKPKNHKGSIAFGIGFFLVLIGWPFFGMLAEAYGFVKLFRGFWPTAAVYLQKSPTFGWIFHHPLVTSVRL

SEQ ID NO: 8303 - protein, 918 aa, Salmonella typhimurium LT2
MTNYSLRARMMILILAPTVLIGLLLSIFFVVHRYNDLQRQLEDAGASIIEPLAVSSEYGMNLQNRESIGQLISVLHRRHSDIVRAISVYDDHNRLFVTSNFHLDPSQMQLPAGAPFPRRLSVDRHGDIMILRTPIISESYSPDESAIADAKNTKNMLGYVALELDLKSVRLQQYKEIFISSVMMLFCIGIALIFGWRLMRDVTGPIRNMVNTVDRIRRGQLDSRVEGFMLGELDMLKNGINSMAMSLAAYHEEMQHNIDQATSDLRETLEQMEIQNVELDLAKKRAQEAARIKSEFLANMSHELRTPLNGVIGFTRLTLKTELNPTQRDHLNTIERSANNLLAIINDVLDFSKLEAGKLILESIPFPLRNTLDEVVTLLAHSSHDKGLELTLNIKNDVPDNVIGDPLRLQQVITNLVGNAIKFTESGNIDILVEKRALSNTKVQIEVQIRDTGIGIPERDQSRLFQAFRQADASISRRHGGTGLGLVITQKLVNEMGGDISFHSQPNRGSTFWFHINLDLNPNVIIDGPSTACLAGKRLAYVEPNATAAQCTLDLLSDTPVEVVYSPTFSALPLAHYDIMILSVPVTFREPLTMQHERLAKAASMTDFLLLALPCHAQINAEKLKQGGAAACLLKPLTSTRLLPALTEYCQLNHHPEPLLMDTSKITMTVMAVDDNPANLKLIGALLEDKVQHVELCDSGHQAVDRAKQMQFDLILMDIQMPDMDGIRACELIHQLPHQQQTPVIAVTAHAMAGQKEKLLSAGMNDYLAKPIEEEKLHNLLLRYKPGANVAARLMAPEPAEFIFNPNATLDWQLALRQAAGKPDLARDMLQMLIDFLPEVRNKIEEQLVGENPNGLVDLVHKLHGSCGYSGVPRMKNLCQLIEQQLRSGVHEEELEPEFLELLDEMDNVAREAKKILG

SEQ ID NO: 8304 - protein, 607 aa, Bacillus cereus E33L
MCGITGWVNWNKDLSNEHVILKKMANRIQHRGPDAEGFWFSPRAAFAHRRLIVIDPEGGAQPKTFRAGDYTYALTYNGEIYNFRELREHLQKCGHTFETHSDTEVLLHAYLEWKEDCVQHLNGIFAFALWDDQKQRLFLARDHLGVKPLFYTERNDSIIFGSEIKALLAHPSVPAEIDANGINEIFGLGLFRTPGCGVFKHIEEVRAGHSITFTRDKKVVTKYWNLESKVHTDSIEDTSSHILSILQDTVKRQLIADVPLVCMLSGGLDSSGITALAGKEFAAENKTLHTYSVDFVNSAKDFELTFARTGLDAPWVKRVSEHVGTSHHDIIVNAEELANRLFVPLRAKDLPSAGEMETSLYLLFCEMKKDATVALSGESADEVFGGYPWFHQEELLYVDKFPWLTNWKNTSPLLLHEVSNQCNLENYIDTRFQKAILEVPTLEGESKKSAKQRQMFYLFLTRFLPFLLDRKDRMSMAVGFEVRVPFCDYRLVEYLWNVPFNIKSIDNIEKGILRRALKPALPDDVRNRRKSAYPTSQDPHYLQTIRNLTLDMCSNKNNPIFSLINHSTLLAIANQSNKEINNFEARSAIEYMLQVNEWLKTYHIHIA

SEQ ID NO: 8305 - protein, 231 aa, Triticum aestivum
  misc_feature (8)..(8): Xaa can be any naturally occurring amino acid
  misc_feature (29)..(29): Xaa can be any naturally occurring amino acid
MGGSERTXVWFRRDLRIDDNPALAAAAGXAVLLLIWCPAEEGRFYPGRCSRWWLKESLAHLARSLEALGCPLVLIRAQSTLAALLQCVDSIGATRVVYNHLYDPISLVRDDKIKNELLGLGISMQSFNGDLLYEPWQVYDENGLAFTTFNMYWEKCMKLHIEISSSLAPWRLVPVSGIENICSSSIDDLGLESSKDEESSNALLSRAWSPGWRNAEKTLEDFVSHGLLDHR

SEQ ID NO: 8306 - protein, 152 aa, Arabidopsis thaliana
  misc_feature (113)..(113): Xaa can be any naturally occurring amino acid
  misc_feature (119)..(119): Xaa can be any naturally occurring amino acid
  misc_feature (127)..(128): Xaa can be any naturally occurring amino acid
  misc_feature (132)..(133): Xaa can be any naturally occurring amino acid
  misc_feature (138)..(139): Xaa can be any naturally occurring amino acid
  misc_feature (142)..(142): Xaa can be any naturally occurring amino acid
DWQMGDIIYTLTNRRWSEKCISYAESHDQALVGDKTIAFWLMDKDMYDFMAVDRPSTPLIDRGIALHKMIRLITMGLGGEGYLNFMGNEFGHPEWIDFPRGEQRLSDGSVIPXNNFSYXKCRRRFDXXGSDXXRYPGXXNFXQTSVEGDFEG

SEQ ID NO: 8307 - protein, 547 aa, Prosthecochloris aestuarii DSM 271
MSRIFQALVMIAVLSFGILLGSRLQNDSLGPVFGYQKKLFDVINLISSRYVDDVDPDSLAESGIKGMVESLDPHTVYLSQDKVSYSKAEFKGNFEGIGIEFDIIRDTLVVVAPLTSGPSQDAGIMAGDRILAIDSVSAIGIASSAVVASLRGEKGSSVHLDLYRPFSKRFLHLDVKRDRIPTYSIDASFLLDDRTGYIRLSRFVSTTSDEFVQSLSDLKSRGMKGLVVDLRGNPGGYLEEAVEIADEFLAPDSLIVYTKSRHGGPDEIKYRSTADGDYQSGPLVILVDRGSASAAEILAGALQDSRRAPVVGELTFGKGLVQRQFDLYDGSAIRLTIARYYTPLGRQIQRDYDNGARGREDYYEDHSSLLASESFFDDREDLAVATDVDGVRVYRTDAVSLGEVADSAAVKAFGGVGGIIPDFWVLDDRPGEYFVMLQEKGVIEETALAVLDDSASRVRELGGSLDLFLEKYAENQRVERYLEMVCRRKNMTIDALELEREKTRIMIAVKSRIARQLFGIGGQIRVLVEEADKVLLVAREQLYKEVL

SEQ ID NO: 8308 - protein, 111 aa, Arabidopsis thaliana
  misc_feature (24)..(24): Xaa can be any naturally occurring amino acid
  misc_feature (34)..(34): Xaa can be any naturally occurring amino acid
IRNCPSVRIRAPVRLSLHFHWTNXYSDYRIGCSXPGKYKIVLDSDNSLFGGFNRLDDSAEFFTSDGRHDDRPCSFMVYAPCRTAVVYAAVDDDDDDERSSLVPIGLLPEDV

SEQ ID NO: 8309 - protein, 325 aa, Triticum aestivum
MAWWAGSMGGLDLRNHLAQFGGPAAGGAAMGGAEQAPTTPNSSGSNNHDDSSGAAQDSPTAGAGDNSPNPNAAISGSGPSGGGGGSGGGGSSSGRRPRGRPAGSKNKPKPPIIITRESPNTLRSHVLEIASGADIMEAVSTFARRRQRGVSVLSGSGVVGNVTLRQPAAPPGSVVTLHGRFEILSLSGAFLPSPCPPGATGLAVYLAGGQGQVVGGTVIGELVASGPVMVVAATFSNATYERLPLADEEPGEAAAAATGSDGMQLPDGPAPGGNGGMGAAVGVPGLPDPSSMPFYNLPPNLQMPNGGGQMAHDVFGSFRPPPPAF

SEQ ID NO: 8310 - protein, 421 aa, Lotus corniculatus var. japonicus
MNHCVVLCIIVVGFFFFFFLSQFVMQIKREISIMKLVRHPYVVRLYEVLASRTKIYIILEFITGGELFDKIIRHGRLSEAESRRYFQQLIDGVDYCHSKGVYHRDLKPENLLLDSLGNIKISDFGLSALPEQGVSILRTTCGTPNYVAPEVLSHKGYNGAVADVWSCGVILYVLLVGYLPFDELDLTSLYSKIEKAEYSCPPGFPVGAKTLIHKILDPNPETRITIEQIRNDEWFQRGYVPVSLLEYEDVNLDDVNAVFDDAEEQRANQQCDHEDMGPLMLNAFDLIILSQGLNLAAIFDRGQDSMKYQTRFITQKPAKVVLSSMEVVAQSMGFKTHIRNYKMRVEGLSAKKTSHFSVMLEIFEVAPTFYMVDIQKAAGDAGEYLKFYKNFCGNLEDIIWKPPHESTKSKVSKTRSKRRSR

SEQ ID NO: 8311 - protein, 441 aa, Streptomyces avermitilis MA-4680
MIRRMATNPISQFPAGFLWGVSTSAHQIEGAADEREPSVWDAFTAEPGRVKDGSTAAVACDHYHRYAEDVALLADLGVDAYRFSVSWPRVNSPGGLDFYDRLVDELCAAGVRPVPTLFHWDLPLALDWLDRDTAARFAEYAARVAERLGDRVTKWITLNEPAEHTLLGHALGAHAPGRQLLFDALPAAHHQLLAHGLAVRALRAAGVTDIGIANSHGPTWPASQEPADLEAAAFYDLLLNRLFSDPLLLGRYPEGIGELMPKGSAGIESDLKVIAEPIDWYGINYYAPTKVGAPQGAEIEFGGLTLPAELPFSVREIEGHPVTDFGWPVVPQALTELLTGFRERFGDRLPPIVITENGCSYEGIDDQERIAYLDGHVRALHRAVEAGVDVRGYFVWSLLDNFEWAEGYERRFGLVHVDYDTLERTPKASYGWLRDALRARR

SEQ ID NO: 8312 - protein, 970 aa, Ustilago maydis 521
MAARTPAREAAAAKMAMPSSLLKRAALTASDETLLVSALKMLATFDNAKNTVFALVVYRYSTRLLRHVRAYGISESLYQLYCLVSAQVFALILKTPAAKRKVKRELDTAMAEVEAKIVPRPSHLGIHHQLPQLGKETEWIKTELAKLQIMEAGVDAKLVEADWENRDGQMVWKGGKVSGAVYHGGDDLSDLLADTIKQFLVSNPLHPDVFPGVRKMEAEVVSMVLKMYNAPAGAVGATSSGGTESILLSCLAMREWARATKGIKEPELIVSVSAHAAFDKAGQYFGIKVHHIPVDTVTRKVQVARVARAINSNTIGLVGSAPNFPDGIIDDIPNLAKLAKRHKILLHVDCCLGSFLVPFLEKAGFESEPFDFRIDGVTSISCDTHKYGFGPKGLSTILYRSADLRRFQYYVKTDWPGGVYATPTLSGSRPGSLIAGTWAAMMKIGESGYTQSCRDIVGAAKEISTRIEREIPELRVLGRPLVSVVAFASAAPNSVSIYDLITDLKAAVKHARSSFTGQKGSMATLYGLGSGVSATAIVGQLASSRLELQQLRLQDLVGLAQPCTLLCQGVQFLLGVHRLGVLLAEEDADFVAQGCALLHLARQLCAQVLVFELYTLQPILDVVQTCLCGLDEVDHLVPLVQELAHLHPLLLVLEHIRIPLDHFGAIALQLRVHLKQLCARLLELPSERNDACRIFLCLRLELSCLGRPRLALLSLGVLRLVRRAQRAHRVVQILSLRFQRCVGDLFAISKLSSLRSSRFSRCSNDTLVAWLPTLPSTAVRIVVSYDGMADNAVSLDASRAAVVGASAAKWLIASACRDVGDRGDVPLTVWLRDCNDDIEPDRERTRASDTCVAGDTGIEQATCEALELPIAVTIAGVAAAAALAAGSSFESVLLAAMPLAALVGIGVASSNLCAAAAMGWMAEPKSISVHVASLAASPAAPVETSGAPERNDAYVSRISSGFTERGSRCH

SEQ ID NO: 8313 - protein, 454 aa, Staphylococcus xylosus
PSGPLLMQDIYFLEQMAHFDREVIPERRMHAKGSGAFGTFTVTNDITKYTCASIFAEVGKQTEMFARFSTVAGERGAGDAERDIRGFALKFYTDEGNWDLVGNNTPVFFFRDPKLFPSLNHVVKRNPKTNMKDPQANWDFWTLLPEALHQITILMTDRGIPKGFRNMHGFGSHTYSMYNDKGERFWVKFHHRTQQGIENYSAEEAEQVMAKDRDSSQRDLFNNIEQGNFPKWKMYIQVMTEEQARNHKDNPFDLTKVWYKDEYPLIEVGEFELNRNPENYFQDVEQAAFAPTNIVPGLDFSPDKMLQGRLFSYGDTQRYRLGVNHWQIPVNQPKGVGMENICPFSRDGQMRILDNNQGASTHYYPNSNGAFEDQPQYKKPALDIQGQAYEYDFREDDDNYFEQPGKLFRLLSSEEQQILFNNTANEMSPVTDALKHRHIRHCYKADPAYGQGVA

SEQ ID NO: 8314 - protein, 443 aa, Staphylococcus xylosus
GPLLMQDIYFLEQMAHFDREVIPERRMHAKGSGAFGTFTVTNDITKYTCASIFAEVGKQTEMFARFSTVAGERGAGDAERDIRGFALKFYTDEGNWDLVGNNTPVFFFRDPKLFPSLNHVVKRNPKTNMKDPQANWDFWTLLPEALHQITILMTDRGIPKGFRNMHGFGSHTYSMYNDKGERFWVKFHHRTQQGIENYSAEKAEQVMAKDRDSSQRDLFNNIEQGNFPKWKMYIQVMTEEQARNHKDNPFDLTKVWYKDEYPLIEVGEFELNRNPENYFQDVEQAAFAPTNIVPGLDFSPDKMLQGRLFSYGDTQRYRLGVNHWQIPVNQPKGVGMENICPFSRDGQMRILDNNQGASTHYYPNSNGAFEDQPQYKKPALDIQGQAYEYDFREDDDNYFEQPGKLFRLLSSEEQQILFNNTANEMSPVTDALKHRHIRHCYKA

SEQ ID NO: 8315 - protein, 447 aa, Staphylococcus xylosus
PLLMQDIYFLEQMAHFDREVIPERRMHAKGSGAFGTFTVTNDITKYTCASIFAEVGKQTEMFARFSTVAGERGAGDAERDIRGFALKFYTDEGNWDLVGNNTPVFFFRDPKLFPSLNHVVKRNPKTNMKDPQANWDFWTLLPEALHQITILMTDRGIPKGFRNMHGFGSHTYSMYNDKGERFWVKFHHRTQQGIENYSAEEAEQVMAKDRDSSQRDLFNNIEQGNFPKWKMYIQVKTEEQARNHKDNPFDLTKVWYKDEYPLIEVGEFELNRNPENYFQDVEQAAFAPTNIVPGLDFSPDKMLQGRLFSYGDTQRYRLGVNHWQIPVNQPKGVGMENICPFSRDGQMRILDNNQGASTHYYPNSNGAFEDQPQYKKPALDIQGQAYEYDFREDDDNYFEQPGKLFRLLSSEEQQILFNNTANEMSPVTDALKHRHIRHCYKADPAHG

SEQ ID NO: 8316 - protein, 177 aa, Callerya atropurpurea
YPATDIPQAARFLFMKNKVRMIVDCHAKHVKVLQDEKLPFDLTLCGSTLRAPHSCHLQYMANMDSIASLVMAVVVNDSEEDGDSSEAVQPQKRKRLWGLVVCHNTTPRFVPFPLRYACEFLAQVFAIHVNKEIELEYQILEKNILRTQTLLCDMLMRDAPLGIVSQSPNIMDLVKCD

SEQ ID NO: 8317 - protein, 454 aa, Staphylococcus xylosus
GPLLMQDIYFLEQMAHFDREVIPERRMHAKGSGAFGTFTVTNDITKYTCASIFAEVGKQTEMFARFSTVAGERGAGDAERDIRGFALKFYTDEGNWDLVGNNTPVFFFRDPKLFPSLNHVVKRNPKTNMKDPQANWDFWTLLPEALHQITILMTDRGIPKGFRNMHGFGSHTYSMYNDKGERFWVKFHHRTQQGIENYSAEKAEQVMAKDKDSSQRDLFNNIEQGNFPKWKMYIQVMTEEQARNHKDNPFDLTKVWYKDEYPLIEVGEFELNRNPENYFQDVEQAAFAPTNIVPGLDFSPDKMLQGRLFSYGDTQRYRLGVNHWQIPVNQPKGVGMENICPFSRDGQMRILDNNQGASTHYYPNSNGAFEDQPQYKKPALDIQGQAYEYDFREDDDNYFEQPGKLFRLLSSEEQQILFNNTANEMSPVTDALKHRHIRHCYKADPAYGQGVAEA

SEQ ID NO: 8318 - protein, 500 aa, Oryza sativa
MVLTHVEAVEEGSEAAAAVFASRYVQDPVPRYELGERSISKDAAYQIVHDELLLDSSPRLNLASFVTTWMEPECDRLILEAINKNYADMDEYPVTTELQNRCVNIIARLFNAPVGDGEKAVGVGTVGSSEAIMLAGLAFKRRWQNRRKAAGKPHDKPNIVTGANVQVCWEKFARYFEVELKEVKLTEGCYVMDPVKAVDMVDENTICVAAILGSTLTGEFEDVRRLNDLLAAKNKRTGWDTPIHVDAASGGFIAPFIYPELEWDFRLPLVKSINVSGHKYGLVYAGVGWVIWRNKEDLPEELIFHINYLGADQPTFTLNFSKGSSQIIAQYYQFLRLGFEGYKSVMKNCMESARTLREGLEKTGRFTIISKEEGVPLVAFTFKDGAGAQAFRLSSGLRRYGWIVPAYTMPAALEHMTVVRVVVREDFGRPLAERFLSHVRMALDEMDLAARAPVPRVQLTIELGPARTAGEEASIRVVKSEAVPVRKSVPLVAGKTKGVC

SEQ ID NO: 8319 - protein, 530 aa, Nocardioides sp. JS614
MRVALEAGAGTEPVVVVADQRAERDVVGVVVLAEGERVPGEESGPAGEVPISSPADLDAHRHHCAVPPASPDSSPGSRSGSPAGSSLPQLPPGFRFGTSTASYQIEGAATEDGKGPSVWDTFTAEEGRIVDGSSGAVACDHYHRYGEDVALMKRLGAGGYRFSLSWPRIQPTGSGPANPKGLDFYDRLIDELLANGVQPMATLYHWDLPQALEDDGGWLNRATVDRFAEYAAIVGERFADRVEHWIPVNEPNVVMMMGYAVGFQAPGRTLMFDSMPVAHHLLLAHGRAAVELRAAGATSIGCANNHSPMWPASDDEADVGATKLFDALWNGMFTEPMLLGRYPADLQPLMADVVCDGDLSVIRQPLDFYGVNYYHPFKIGAAREDAEMPFEFRELVGYPTTDFGWPVVPDALREWLITLRARYRAALPPIYITESGCSYNMGPDEFGVVDDQPRIDYLDAHLRAVATACQRGVDVRGYYTWSLMDNFEWSEGYTQRFGLVHVDFDTQVRTPKRSFQWYADVIARQTRSVG

SEQ ID NO: 8320 - protein, 441 aa, Arabidopsis thaliana
MANKYVSSVLKSLLLLLHLVFLSKQHVDSASIVKSLPGFEGPLPFELETGYIGVGEEEEVQLFYYFIKSERNPKEDPLLLWLSGGPGCSSISGLLFENGPLAMKLDVYNGTLPSLVSTTYSWTKTSSMIFLDQPVGTGFSYSRTQQFNKPSDSGEAKRIHEFLQKWLGKHQEFSSNPFYVAGDSYSGLVVPATVQEISKGNYECCNPPINLQGYVLGNPLTDYATGCNCRIPFAHGMALISDELYESLKKTCKGEYTNVHPRNTQCLKFVEEFNKCTNRICQQLILDPLCETETPDCYIYRYLLTTYWANDATVREALQINKESIGEWVRCYYGIPYNNDIKSSMPYHVNNSISGYRSLIYSGDHDFEVPFLGTQAWIRSLNYSIIDDWRPWMVKNQIAGYTRTYANKMTFATIKGGGHTAESKPEEASIMFQRWINGQPL

SEQ ID NO: 8321 - protein, 488 aa, Streptomyces coelicolor
MPENNQKPLTTVAGPPVPDNQNSLTSGPRRPMLLQDVWFLEKLAHFDREVIPERRMHAKGSGLFGTFTVTHDITRYTSAKIFSEIGKKTPLFTRFSTVAGERGAADAERDIRGFAVKFYTDEGNWDLVGNNTPVFFFRDPLKFPDLNHAVKRDPRTNLRNAENNWDFWTNLPEALHQVTIVMSDRGIPASYRHMHGFGSHTYSLINAEGERFWVKFHHRTQQGIKNLTDAEAEALVGKDRESHQRDLFDAIEDGDFPKWKLFIQVMPEADAENYRFHPFDLTKVWSKKDYPLIEVGEWELNRNPDNYFADVEQAAFSPANVVPGIEASPDRMLQGRLFSYGDAQRYRLGVNHHHQIPVNAPKNPVNSYHRDPAMRVDGNQGATPGIEPNSYGRWQEQPAYRDPAQAVGAVADRFNYREDDDNYFEQPGNLFRQMSPEQQQVLFENTARAIDGASAQTIERHIGNCTQADPAYGAGVRKAIEALAAGNL

SEQ ID NO: 8322 - protein, 165 aa, Oryza sativa
  misc_feature (11)..(11): Xaa can be any naturally occurring amino acid
  misc_feature (52)..(52): Xaa can be any naturally occurring amino acid
  misc_feature (90)..(90): Xaa can be any naturally occurring amino acid
  misc_feature (116)..(116): Xaa can be any naturally occurring amino acid
  misc_feature (124)..(124): Xaa can be any naturally occurring amino acid
  misc_feature (135)..(135): Xaa can be any naturally occurring amino acid
MSLIRRSNVFXPFSFDLWDPFDGFPFGSGSRSSGSIFPSFPRGTSSETAAFXPGARIDWKETPEAHVFKADVPGLKKEEVKVEVEDGNVXSRSAASAARSQEEKTDKWHRVERSSXGKFLRRFXRLPENTKPEQXKASMENGVLTVTVPKEEPKKPDVKSIQVTG

SEQ ID NO: 8323 - protein, 502 aa, Secale cereale
MDGGGEHSEALKNYYLGKILGVGTFAKVIIAEHKHTRHKVAIKVLNRRQMRAPEMEEKAKREIKILRLFIDLIHPHIIRVYEVIVTPKDIFVVMEYCQNGDLLDYILEKRRLQEDEARRTFQQIISAVEYCHRNKVVHRDLKPENLLLDSKYNVKLADFGLSNVMHDGHFLKTSCGSLNYAAPEVISGKLYAGPEIDVWSCGVILYALLCGAVPFDDDNIPNLFKKIKGGTYILPIYLSDLVRDLISRMLIVDPMKRITIGEIRKHSWFQNRLPRYLAVPPPDMMQQAKMIDEDTLRDVVKLGYDKDHVCESLCNRLQNEETVAYYLLLDNRFRATSGYLGAHYQQPMESASPSTRSYLPGSNDSQGSGLRPYYRVERKWALGLQQSRAPPRAIMIEVLKALKELNVCWKKNGDCYNMKCRWCPGFPRVSDMLLDANHSFVDDCAIKDNGDANSRLPAVIKFEIQLYKTKDDKYLLDMQRVTGPQLLFLEFCAAFLTNLRVL

SEQ ID NO: 8324 - protein, 249 aa, Pisum sativum
MGRGRVELKRIENKINRQVTFAKRRNGLLKKAYELSVLCDAEVALIIFSTRGKLYEFCSTSNMLKTLDRYQKCSYGAVEVSKPAKELESSYREYLKLKQRFENLQRTQRNLLGEDLGPLSSKDLEQLERQLDSSLKHVRSTKTQFMLDQLADLQNKEHMLVEANRSLSMKLDEINSRNQYRQSWEAGDQSMQYGDQQNAHSQSFFQQLDCNPTLQIGSDYRYNNVASDQIASTSQAQQQVNGFVPGWML

SEQ ID NO: 8325 - protein, 446 aa, Lotus corniculatus var. japonicus
MKKVRRRIGKYEVGRTIGEGTFAKVKFAKNSETGESVAIKIMDKTTILKHRMVEQIKREISIMKIVRHPNIVRLHEVLSSQTKIYIILEFVMGGELYDRIVQRGKLSEDESRRYFQQLIDAVAHCHKKGVYHRDLKPENLLLDAFGNLKVSDFGLSALTKQGVDLLHTTCGTPSYVAPEVLSNQGYDGAAADVWSCGVILYVLKAGYLPFEEADLSTLYRRTSAAEFVCPSWFSTGTTTLIHKILDPNPKTRVKIGEIRKDPWFQRNYLPLKLNEDEQVNLDDVQAVFDDIEDQYVPVQSEITEGGPLVMNAFEMITLSQGLNLSPLFDRHQDYVKRQTRFVSRKPAKVIISSIKVVAESMGLKLQSRNYKMRIEGLSANKAGQFAVVLEVYEVAPCLYMVDVRKAAGDTLDYHKFYKNLCAKLENIIWRPTETMPDSGLLRQMTL

SEQ ID NO: 8326 - protein, 243 aa, Pisum sativum
MSFPNESMPDSPQRKIGRGKIEIKRIENTTNRQVTFCKRRNGLLKKAYELSVLCDAEVALIVFSTRGRLYEYANNSVKASIERYKKACSDTSGAKSASETNAQYYQQEAAKLRVQISNLQNHNRQMMGEALSNMNGKELRNLESKLEKGISRIRSKKNEMLFAEIEYMQKREIELHNSNQALRAKISENDQRNNHNVNVLHGGTNFECIQPQQQFDSRSYFQVNELQPNNQYARQDQMSLQFV

SEQ ID NO: 8327 - protein, 190 aa, Dicksonia antarctica
DEHGEVVAEIRKSDLEPYLGLHYPATDIPQASRFLFMKNRVRMICDCRAIPVKVIQDRELRQPLSLAGSTLRAPHGCHGQYMANMGSAASLAMAVTVNDNEEESSSRNHLFKQRKLWGLVVCHHTTPRAVPFPLRSACEFLMQVFGLQLNMEVELSAQLREKHILRTQTLLCDMLLRDAPIGIVSKSPNI

SEQ ID NO: 8328 - protein, 369 aa, Arabidopsis thaliana
MSIEKPFFGDDSNRGVSINGGRYVQYNVYGNLFEVSKKYVPPLRPIGRGASGIVCAAWNSETGEEVAIKKIGNAFGNIIDAKRTLREIKLLKHMDHDNVIAIIDIIRPPQPDNFNDVHIVYELMDTDLHHIIRSNQPLTDDHSRFFLYQLLRGLKYVHSANVLHRDLKPSNLLLNANCDLKIGDFGLARTKSETDFMTEYVVTRWYRAPELLLNCSEYTAAIDIWSVGCILGEIMTREPLFPGRDYVQQLRLITELIGSPDDSSLGFLRSDNARRYVRQLPQYPRQNFAARFPNMSVNAVDLLQKMLVFDPNRRITVDEALCHPYLAPLHEYNEEPVCVRPFHFDFEQPSLTEENIKELIYRESVKFNP

SEQ ID NO: 8329 - protein, 97 aa, Glycine max
MAALGGNRDVAGSQNSLEIDGLARFAVEEHNKKQNALLEFEKVVSAKQQVVSGTLYTITLEAKDGGQKKVYEAKVWEKAWLNFKEVQEFKLVGDAPA

SEQ ID NO: 8330 - protein, 361 aa, Oryza sativa
MLRRWFCCTQFHAPYREHENEFPDIPEEKEGNGFAPKSDDPTKAPPPIEVPELSLDELKEKTDNFGSKALVGEGSYGRVYYATLDNGKQVAVKKLDASTEPEVDNDFLTQVSIVSRLRHENFVEMLGYCVEGNQRLVAYEFATMGSLHDILHGRKGVPGAQPGPALDWMQRVRIAIDAAKGLEYLHEKVQPSIVHRDIRSSNVLLFEDYKAKIADFNPSNQSPDMAARLHSTRVLGTFGYHAPEYAMTGQLTQKSDVYSFGVVLLELLTGRKPVDHTMPRGQQSLVTWATPRLTEDTVKQCVDPRLKGEYPPKGVAKLAAVAALCVQYESEFRPSMSIVVKALSPLLQHKPPPPPAVAPET

SEQ ID NO: 8331 - protein, 541 aa, Arabidopsis thaliana
MFTSGNVTARVFERQIRTPPPGASVNRARHFYENLVPSYTLYDVESPDHCFRKFTEDGLFLISFSRNHQELIVYRPSWLTYSTTDDSTTTLPPLPRRASKFDSFFTQLYSVNLASSNELICKDFFLYHQTRRFGLFATSTAQIHDSSSPSNDAVPGVPSIDKITFVLLRLDDGVVLDERVFLHDFVNLAHNMGVFLYDDLLAILSLRYQRIHLLQIRDSGHLVDARAIGYFCREDDELFLNSSSQAMMSQDKSKQQSLSGSKEDDTGENGLRHSLSQPSGSNSFLSGVKQRLLSFIFREIWNEESDNRVQSLKKKFYFHFQDYVDLIIWKVQFLDRQHLLIKFGSVDGGVTRSADHHPAFFAVYNMETTDIVAFYQNSAEDLYQLFEQFSDHFTVSSSTPFMNFVTSHSNNVYALEQLKYTKNKSNSFSQFVKKMLLSLPFSCQSQSPSPYFDQSLFRFDEKLISAADRHRQSSDNPIKFISRRQPQTLKFKIKPGPECGTADGRSKKICSFLFHPHLPLAISIQQTLFMPPSVVNIHFRR

SEQ ID NO: 8332 - protein, 439 aa, Staphylococcus xylosus
FLEQMAHFDREVIPERRMHAKGSGAFGTFTVTNDITKYTCASIFAEVGKQTEMFARFSTVAGERGAGDAERDIRGFALKFYTDEGNWDLVGNNTPVFFFRDPKLFPSLNHVVKRNPKTNMKDPQANWDFWTLLPEALHQITILMTDRGIPKGFRNMHGFGSHTYSMYNDKGERFWVKFHHRTQQGIENYSAEEAEQVMAKDRDSSQRDLFNNIEQGNFPKWKMYIQVMTEEQARNHKDNPFDLTKVWYKDEYPLIEVGEFELNRNPENYFQDVEQAAFAPTNIVPGLDFSPDKMLQGRLFSYGDTQRYRLGVNHWQIPVNQPKGVGMENICPFSRDGQMRILDNNQGASTHYYPNSNGAFEDQPQYKKPALDIQGQAYEYDFREDDDNYFEQPGKLFRLLSSEEQQILFNNTANEMSPVTDALKHRHIRHCYKADPAHG

SEQ ID NO: 8333 - protein, 448 aa, Staphylococcus xylosus
GPLLMQDIYFLEQMAHFDREVIPERRMHAKGSGAFGTFTVTNDITKYTCASIFAEVGKQTEMFARFSTVAGERGAGDAERDIRGFALKFYTDEGNWDLVGNNTPVFFFRDPKLFPSLNHVVKRNPKTNIKDPQANWDFWTLLPEALHQITILMTDRGIPKGFRNMHGFGSHTYSMYNDKGERFWVKFHHRTQQGIENYSAEQAEQVMAKDRDSSQRDLFNNIEQGNFPKWKMYIQVMTEEQARNHKDNPFDLTKVWYKDEYPLIEVGEFELNRNPENYFQDVEQAAFAPTNIVPGLDFSPDKMLQGRLFSYGDTQRYRLGVNHWQIPVNQPKGVGMENICPFSRDGQMRILDNNQGASTHYYPNSNGAFEDQPQYKKPALDIQGQAYEYDFREDDDNYFEQPGKLFRLLSSEEQQILFNNTANEMSPVTDALKHRHIRHCYKADPAYG

SEQ ID NO: 8334 - protein, 450 aa, Staphylococcus xylosus
PRGPLLMQDIYFLEQMAHFDREVIPERRMHAKGSGAFGTFTVTNDITKYTCASIFAEVGKQTEMFARFSTVAGERGAGDAERDIRGFALKFYTDEGNWDLVGNNTPVFFFRDPKLFPSLNHVVKRNPKTNIKDPQANWDFWTLLPEALHQITILMTDRGIPKGFRNMHGFGSHTYSMYNDKGERFWVKFHHRTQQGIENYSAEKAEQVMAKDRDSSQRDLFNNIEQGNFPKWKMYIQVMTEEQARNHKDNPFDLTKVWYKDEYPLIEVGEFELNRNPENYFQDVEQAAFAPTNIVPGLDFSPDKMLQGRLFSYGDTQRYRLGVNHWQIPVNQPKGVGMENICPFSRDGQMRILDNNQGASTHYYPNSNGAFEDQPQYKKPALDIQGQAYEYDFREDDDNYFEQPGKLFRLLSSEEQQILFNNTANEMSPVTDALKHRHIRHCYKADPAYG

SEQ ID NO: 8335 - protein, 426 aa, Staphylococcus xylosus
REVIPERRMHATGSGAFGTFTVTNDITKYTCASIFAEVGKQTEMFARFSTVAGERGAGDAERDIRGFALKFYTDEGNWDLVGNNTPVFFFRDPKLFPSLNHVVKRNPKTNMKDPQANWDFWTLLPEALHQITILMTDRGIPKGFRNMHGFGSHTYSMYNDKGERFWVKFHHRTQQGIENYSAEEAEQVMAKDRDSSQRDLFNNIEQGNFPKWKMYIQVMTEEQARNHKDNPFDLTKVWYKDEYPLIEVGEFELNRNPENYFQDVEQAAFAPTNIVPGLDFSPDKMLQGRLFSYGDTQRYRLGVNHWQIPVNQPKGVGMENICPFSRDGQMRILDNNQGASTHYYPNSNGAFEDQPQYKKPALDIQGQAYEYDFREDDDNYFEQPGKLFRLLSSEEQQILFNNTANEMSPVTDALKHCHIRQCYIAD

SEQ ID NO: 8336 - protein, 106 aa, Triticum aestivum
RAAARAGGKRGGYMEITGFSAPVREQIYKIASVNLCSNITGQILASLVMNPPKASDESYASYKAEKDGILASLARRAKALEIAFSKLEGITCNKAEGAMYLGRDHA

SEQ ID NO: 8337 - protein, 612 aa, Arabidopsis thaliana
MGAALLCLLYFLSFLTLSLSSVNIDCGTSLPGVDNNNLKWVGDQDFITSGDSATISSTTVEKSLTTLRYFPTGDSNCYSNIPVTKGGKVLVRTMFYYGNYDGKSSTPSFSVVFEGKHRGTLSISSAFEPYLLELIFSPAGGETSVCFVRTSSSSNPFVSSIEVVDLDDGMYAELGPGEGLFYQQRRAYGATEFLRSDLQGRFWLPSEINILVTGIQSTAVSIDTSGASNKPPESVLRNSWTGEGLSLVDPTLPSAGVPVYLAMYFSEPLESSLRSFNIFFGGKQVGRGPVVPLFGKATQVVVRDVVASSSTLLTLWSTSSALLPPMINAAELYVISKGTSESTGGNETGSGSGSGSGGSGGGGSGSSGSGSGGTSKGGTGGSNEVSPGGSTNGKSSKLPIILGVVSPVAFVLVAYVFIAIILANRRKVRLQALAMPTFEESSSKTKQNRANRVSETMSLVPTFFGGRRTNVFDPFSLDVWDPFEGFLTPGLTNAPAKDVAAFTNAKVDWRETPEAHVFKADVPGLKKEEVKVEVEDGNILQISGERSSENEEKSDTWHRVERSSGKFMRRFRLPENAKVEEVKASMENGVLSVTVPKVQESKPEVKSVDISG

SEQ ID NO: 8338 - protein, 465 aa, Staphylococcus xylosus
ENSMTAGPRGPLLMQDIYFLEQMAHFDREVIPERRMHAKGSGAFGTFTVTNDITKYTCASIFAEIGKQTEMFARFSTVAGERGAGDAERDIRGFALKFYTEEGNWDLVGNNTPVFFFRDPKLFPSLNHVVKRNPKTNMKDPQANWDFWTLLPEALHQITILMTDRGIPKGFRNMHGFGSHTYSMYNDKGERFWVKFHHRTQQGIENYTAEEAEQVIAKDRDSSQRDLFNTIEQGNFPKWKMYIQVMTEEQARNHKDNPFDLTKVWYKDEYPLIEVGEFELNRNPENYFQDVEQRAFAPTNIVPGLDFSPDKMLQGRLFSYGDTQRYRLGVNHWQIPVNQPKGVGMENICPFSRDGQMRILDNNQGASTHYYPNSNGAFEDQPQYKKPALDIQGQAYEYDFREDDDNYFEQPGKLFRLLSYEEQQTLFKNTANEMSPVTDALKHRHIRHCYKADPAYGQGVAEAMG

SEQ ID NO: 8339 - protein, 542 aa, Solibacter usitatus Ellin6076
MAKQIVYSEASRQAILRGVNQLADAVKVTLGPKGRNVVLEKKFGGPTITKDGVTVAKEIELKDPLENMGAQMVREVASKTSDVAGDGTTTATILAQSIYREGVKAVAAGANPMALKRGIDKAVELATEEVKKLSKPVSGDMIAQVGTISANSDKTIGNIIADAMKKVGKDGVITVEESKTMVTELDTVEGMQFDRGYLSPYFVSDAERMEAVLEDPYILIHEKKISNMKDLLPLLEQIARSGKPLLIIAEEVEGEALATLVVNKLRGTLNACAVKAPGFGDRRKAMLEDIGILTGGKPIMEDIGVKLEGVRLEDLGRAKRVTVDKDNTTIVDGAGNPKGIEGRIKQLRAQIDETTSDYDREKLQERLAKLAGGVAVIKVGAATETEMKEKKARVEDALHATRAAVEEGIVPGGGVALLRAAKALATFKVDGDEQIGVSIVKRACEEPLRQIVSNSGTEGAIVVDKVRENANNNYGYNAATDTYEDLVAAGVIDPTKVTRSALQHAASIAGLMLTTEAMIAEIPEKKSAPAGGPGGHGPEMDY

SEQ ID NO: 8340 - protein, 267 aa, Pseudomonas fluorescens PfO-1
MSVPAFGLGTFRLQGQVVIDSVSTALELGYRVIDTAQIYENEADVGEAIAASGIARDKLFITSKIWIANFAKDRLIESLKASLQKLQTDYLDLTLIHWPSPEDQVPVEEFMGALLEAKRLGLTRQIGVSNFTIDLMKQAIAAVGAENIATNQIELHPYLQNRKVVEFAQSQGIQITSYMTLAYGEVLKDPLIVQIAERLQATPAQVTLAWAMQSGYAVIPSSTKRANLQGNLGAMALTLSDADMALIATLDRGHRLTSPKGIAPQWD

SEQ ID NO: 8341 - protein, 464 aa, Scenedesmus obliquus
MHSRTNCLQTSVRAPQPHFRPFTAVKTCRQRCSTTAAAAKRDQAQEQQPWIQVGLGLAAAATAVAVGLGAAALPAQAVTSEQLLFLEAWRAVDRAYVDKSFNGQSWFKLRETYLKKEPMDRRAQTYDAIRKLLAVLDDPFTRFLEPSRLAALRRGTAGSVTGVGLEITYDGGSGKDVVVLTPAPGGPAEKAGARAGDVIVTVDGTAVKGLSLYDVSDLLQGEADSQVEVVLHAPGAPSNTRTLQLTRQKVTINPVTFTTCSNVAAAALPPGAAKQQLGYVRLATFNSNTTAAAQQAFTELSKQGVAGLVLDIRNNGGGLFPAGVNVARMLVDRGDLVLIADSQGIRDIYSADGNSIDSATPLVVLVNRGTASASEVLAGALKDSKRGLIAGERTFGKGLIQTVVDLSDGSGVAVTVARYQTPAGVDINKIGVSPDVQLDPEVLPTDLEGVCRVLGSDAAPRLFG

SEQ ID NO: 8342 - protein, 555 aa, Cryptococcus curvatus
MSASTKQASTTVAQPSGKPVTNVIDPERDDFIVPDNYVTRTVENMKMLPPVTWRNLHKNIQWISFLALTIPPAMAIYGLCTVPVQTKTFIWSVVYYFITGLGITAGYHRLWAHRSYNASKPLQYFLALCGAGSVQGSIRWWSRGHRAHHRYTDTKLDPYSAHEGFWHAHMGWMLIKPRGKIGVADISDLSKNPVVKWQHNNYVALLFFMGLAFPTLVAGLGWGDWWGGLFFAGAARLVFVHHSTFCVNSLAHWLGETPFDNKHTPKDHFITALVTVGEGYHNFHHQFPMDFRNAIKWYQYDPTKWFIWTMAQLGLASHLKKFPDNEIKKGQYTMKLMQLQEQSEKLEWPKHSNDLPVISWEDFQAESKTRALIAVHGFIHDCSSFIEDHPGGAHLIKRAIGTDSTTAFFGGVYDHSNAAHNLLAMMRVGVLDGGMEVEHLKVGRLTRSNSADSLVSDAPSSASSTVSASSILSEVEDMDKPERKPSTSRSPRCPTPGRSPCLLRRSIASSARPPRSAQDSSRASRAPPRPASHGQRALTLLSRLRAFSVEHPGFH

SEQ ID NO: 8343 - protein, 493 aa, Cryptococcus curvatus
MSASTATAPPATAPAVANPTPAAASAAAAAPAATKDKAETIDPESEHFVVSQNYVTRTVENMTMLPPVTWSNLLQNIQWISFTALTVPPAMAIYGLCTLELQRKTVIWAIVYYFMTGLGITAGYHRLWAHRAYNASAPLQYFLALCGAGSVQGSIKWWSRGHRAHHRYTDTKLDPYSAHEGFWWAHVGWMLVKPRGKIGVADISDLSRNPVVKWQHNNYVMLMVLMGLVFPTLVAGLGWGDWKGGLLFAGAARLVFVHHSTFCVNSLAHWLGETPFDNKHTPKDHFITALVTVGEGYHNFHHQFPMDFRNAIKWYQYDPTKWFIWTMSNVGLASHLKKFPDNEIKKGQYTMKLQMLQEQSGSIQWPKHSNDLPVISWEDFQAEAKERSLVAIHGFIHDCSSFLEDHPGGIHLIKKAIGTDATTAFFGGVYDHSNAAHNLLAMMRVGILDGGMEVESLKLENLQRSMSVSSMESDAASSASSVSVSSISPRWPH

SEQ ID NO: 8344 - protein, 297 aa, Oenococcus oeni PSU-1
MEIKANKLTDTYTLNNNVQIPVIGFGTWQSADGEEAYNAVKWALEAGYRHIDTAAAYGNEESVGQAIKDSGVKREDLFVTTKLWNYQRDNYENSLRGFHDSITRLGLDYVDLYLIHWPEPIEYRDHWQSLNADSWRAMEKIYKDGKTRAIGVSNFREKHIDELMKTAEIAPMVNQIFLNPGDQEKDLVTYNKNHNILTEAYSPLGTGNLLDNPELKKLADKHGVDVAQILIRWNLEKGYLPLPKSTHQKYIESNKKVFSFQLDYDDHKTLDALDGQGKQHTDPHEHNFQKVVPFLNN

SEQ ID NO: 8345 - protein, 241 aa, Pisum sativum
MELPNEGGEGSSQKKLGRGKIEIKRIENTTNRQVTFCKRRNGLLKKAYELSVLCDAEVALVVFSTRGRLYEYANNSVRATIERYKKACAASTNAESVSEANTQFYQQESSKLRRQIRDIQNLNRHILGEALGSLSLKELKNLEGRLEKGLSRVRSRKHETLFADVEFMQKREIELQNHNNYLRAKIAEHERAQQQQQNLMPETMCESLPSQTYDRNFFPVNLLGSDQQEYSRQDQTALQLV

SEQ ID NO: 8346 - protein, 278 aa, Synechococcus elongatus PCC 6301
MTLAIRPKLAFNWPTALFMVAIHIGALLAFLPANFNWPAVGVMVALYYITGCFGITLGWHRLISHRSFEVPKWLEYVLVFCGTLAMQHGPIEWIGLHRHHHLHSDQDVDHHDSNKGFLWSHFLWMIYEIPARTEVDKFTRDIAGDPVYRFFNKYFFGVQVLLGVLLYAWGEAWVGNGWSFVVWGIFARLVVVYHVTWLVNSATHKFGYRSHESGDQSTNCWWVALLAFGEGWHNNHHAYQYSARHGLQWWEFDLTWLIICGLKKVGLARKIKVASPNN

SEQ ID NO: 8347 - protein, 760 aa, Mesorhizobium loti MAFF303099
MIAESDSQQANKGDDAVAAPAAARRFIAAPPLVPEQQLARREGLPLLTFVAIMVLAGLAHLTGAPIFISLALLATGLAGLALHLHARRSVHRTVVLLDETTARSRAEIETLADRMWEMQESEERFRGLIDALGDLVIHRDRDGYIVYANKVFADLVETDQRDLAGKTLAELGIEVGIVPDAAFSDHECLSSTDVAIRTPGGPRWFSWIELSVRDKDSGAASHRAIARDITARKRAESSLITARERAEYASQAKSRFLATVSHEIRTPMNGIMGMARLLADTSLSPEQQTYVGAISTSASALLALIEDLLDYSKIEAGRFDPEPQPMSVREIADNIIELLAARAFAKDIGLGCHVEPDVPQLITADPGRVRQVLLNLIGNAIKFTDGGGVLVSIARARSETSDRICFTITDTGPGLREEDMERIFEEFEQADGTSTRAHGGAGLGLAISKRLVAAMGGTISVSSRLGQGSEFVFEIPATEATEAPQGRQNVLAGRRAVILSRNAVEADAIARTIRANGGTAGIATTVAQAAPLAEGCDVLLVDAAMEESDGRVLKRLRQSGFTDCEAITLIAPTDRGMLGEFRASGYATFLARPVRGGTLLRVLLTSHAPALAQPQPEKRRTPALRASSDRQQGLSVLIAEDNDINAMLARATLLKAGHRVKVVGNGKAAVEAVTGAGHKHRFDVVLMDLHMPVMDGLDAIAAIRRHEEETSAPPVPIMVLSADSQEKTRHAVLAHGASGFVTKPLDPDALVNAVEGQVAA

SEQ ID NO: 8348 - protein, 196 aa, Glycine max
RQDTWTFESLIYKMVSFEMNDRKKIGLGLTGFGIFFSFLGLIFFFDKGLLAMGNILFVSGVSLTIGLKSTMQFFMKRSNFKGTISFGIGFFILILGWPILGMIVESYGFIVLFSGFWPTLAVFLQKIPVLGWLFQQPFVRSVSSCAEMSCPYNLKHLYTPFIKAIYFVILHSCLCVTVSIEDVHGGLKQMLLAVVW

SEQ ID NO: 8349 - protein, 1424 aa, Streptomyces avermitilis MA-4680
MNSKTAEAESRTPGDQELRQLLAGLTAVRDGDFGTRLPDDTDGLLGEIATVFNGMIDQLSVFTSEVTRVAREVGTEGTLGGQAEVPGVSGTWADLTDSVNAMAGNLTTQVRDIAQVATAVAKGDLSQKIDVPARGEILELKETVNTMVDQLSAFADEVTRVAREVGSEGRLGGQAQVPGVGGVWRDLTDSVNLMAGNLTAQVRNVAQVTTAVAKGDLSQKITVDARGEILELKNTINTMVDQLSAFADEVTRVAREVGTDGRLGGQADVKDVRGTWRDLTDSVNFMAGNLTAQVRSIAQVATAVAKGDLSQKITVDARGEILELKDTINTMVDQLSAFADEVTRVAREVGTAGNLGGQATVRGVSGTWKDLTDNVNVMASNLTGQVRSIAQVATAVARGDLSQKITVEAKGEVAALADVINTMVDTLSAFADEVTRVAREVGTEGRLGGQAHVPNVAGTWKDLTDNVNSMANNLTGQVRNIALVTTAVANGDLSKKIDVDARGEILELKTTINTMVDQLSSFAAEVTRVAREVGSEGRLGGQAEVEGVSGTWKRLTENVNELAGNLTRQVRAIAEVASAVAEGDLTRSITVDASGEVAELKDNINSMVGSLRETTRANQEQDWLKSNLARISGLMQGHRDLAVVAELIMEELTPLVSAQYGAFYLAEETGRGTQLRLIGSYGYPDDTQRPDRIPLGRSLVGQAARNRRPITVDDLPPAYVTISSGLGQISPTALKVLPIVVDEQVLGVIELASVTRFTQIHEDFLGQLMETIGVNVNTIVANGRTDELLGESQRLTAELQSRSEELQVQQDELQRSNAELEEKATLLATQNRDIEAKNLQIEQARQELEARAQQLSLASKYKSEFLANMSHELRTPLNSLLILAQLLAQNPSHNLTPKQVEYAGIIHSAGSDLLQLINDILDLSKVEAGKMDISPERVALRRLLDYVEATFRPMTSQKSLEFTMSTAPGVPVDLLTDDSRLRQVLRNLLSNAVKFTERGGVGLHIEPAVDQNIPAAVHRGGAVVAFHVKDTGIGIPEQQLETIFGAFQQADGTTSRKYGGTGLGLSITREIAHLLGGAVTVDSTPGQGSTFTLYLPVARADFEELAQGAQPGEASQGDGAADHPRGSQALTGAGGPTHRRRRILVVEERPRGLLTLVAESTVANLTRGHHGGDPREVIDVTTTVDAQEAAGALAAEPCHCVVLELGMSGGEASRFLDALDGDPALASVPVLVHNGQRADVTLDPALRSRSAARSLEIFSSLDELRERIALHLSAEEPGDVLPLVRPEKPQPEQTLVVDGTFTGRTVLVVDDDARNLFALSGILELHGFKVLHAENGRKGVDTLLAHPEICLVLMDVMMPEMDGYAATTEIRSMSQYTDLPVVAVTAKAMPGDREKALQSGASDYVTKPVDANDLIACVRRWLSA

SEQ ID NO: 8350 - protein, 253 aa, Helianthus annuus
MGKGRLELKRIENKINRQVTFAKRRNGLLKKAYELSVLCDAEVALIIFSTRGKLYEFSSTSSMLKTLERYEKCSFGPPEQRKPAKEDLQEQSSYQEYMRLKERYDALKQLERNYYGEEIDSLTTNELESLERQLHCSLKQIRTIRTQSLIDKLYEQQKMEHQLYEYNKTLRLRLDEESQAEALQWDVHAHAHANGMVYGHHHQHQVSHPAHGAFYHPTGCETTLQIGYQTEQISGATSSSMSHHHHQMQGWPA

SEQ ID NO: 8351 - protein, 238 aa, Haemophilus influenzae R2866
MLFALPALNDNYIWLYQRENLPLIIVDLPETDKLFAWLDKQNATIEAVLLTHEHDDHTQGVSAFKKRYPTVPIYGPQECEKKGATQIVNEGKILTANYQIDVIPTGGHTKQHVSFLVDNHLFCGDALFSAGCGRVFTGNYAQMFEGLQRLNTLPDETIVCPAHEYTLGNLAFAETVLVDKSAVEKSAVEKQRIFVETQRAENKLSLPTTLKLEREINPFLQAKTLEEFTALRKAKDIF

SEQ ID NO: 8352 - protein, 450 aa, Staphylococcus xylosus
PRGPLLMQDIYFLEQMAHFDREVIPERRMHAKGSGAFGTFTVTNDITKYTCASIFAEVGKQTEMFARFSTVAGERGAGDAERDIRGFALKFYTDEGNWDLVGNNTPVFFFRDPKLFPSLNHVVKRNPKTNIKDPQANWDFWTLLPEALHQITILMTDRGIPKGFRNMHGFGSHTYSMYNDKGERFWVKFHHRTQQGIENYSAEEAEQVMAKDRDSSQRDLFNNIEQGNFPKWKMYIQVMTEEQARNHKDNPFDLTKVWYKDEYPLIEVGEFELNRNPENYFQDVEQAAFAPTNIVPGLDFSPDKMLQGRLFSYGDTQRYRLGVNHWQIPVNQPKGVGMENICPFSRDGQMRILDNNQGASTHYYPNSNGAFEDQPQYKKPALDIQGQAYEYDFREDDDNYFEQPGKLFRLLSSEEQQILFNNTANEMSPVTDALKHRHIRHCYKADPAYG

SEQ ID NO: 8353 - protein, 221 aa, Arabidopsis thaliana
MAQQSLIYSFVARGTVILVEFTDFKGNFTSIAAQCLQKLPSSNNKFTYNCDGHTFNYLVENGFTYCVVAVDSAGRQIPMAFLERVKEDFNKRYGGGKAATAQANSLNIEFGSKLKEHMQYCMDHPDEISKLAKVKAQVSEVKGVMMENIEKVLDRGEKIELLVDKTENLRSQAQDFRTQGTQMRRKMWFQNMKIKLIVLAIIIALILIIILSICGGFNCGK

SEQ ID NO: 8354 - protein, 477 aa, Pisum sativum
MGLENNSQKLLSKIATNNKHGENSPYFDGWKAYESNPFHPTKNPQGVIQMGLAENQLCFDLIEEWIKNNPKASICTPEGVNQFRHIANFQDYHGLPEFKNAVANLMSKVRGGRVRFDPDRLLMSGGATGANELIMFCLADPGDAFLVPSPYYPAFVRDLCWRTGLQLIPVQCHSSNNFMITREALEEAHKKAQDENINVKGLIITNPSNPLGTTIEKETLKSIVSFINENNIHLVCDEIYSGTFYDTPKFVSVSEIIQEMEDIKEDSIHTTYSLPKDLGLPGFRVGFVYSSTDEDVDCRTKNSSFGLLRRETQIFLLQILYDGKTQERFLRAVQKRLALRREVFTKGTPKVGIKCSQSYGGLLVCMHLSLKEKTVEGENDCRVIVHEVTIIVLPGVSFHCSEPGWYRVCFANMDEETVEIALMRIRAFVNGREKGVKKVEMKRWKSNLRLSFSSRRFEENVMSPHSPIPHSPLVRAT

SEQ ID NO: 8355 - protein, 545 aa, Rhodobacter capsulatus
MAAKEVKFSTDARDRMLKGVNILADAVKVTLGPKGRNVVIEKSFGAPRITKDGVSVAKEIELADKFENMGAQMVKEVASRTNDEAGDGTTTATVLAQAIVREGMKAVAAGMNPMDLKRGIDLATTTVVEAIKAAARPVKDSDEVAQVGTISANGEAQIGRFIADASQKVGNEGVITVEENKGMDTEVEVVEGMQFDRGYLSPYFVTNPDKMIADLEDAYILLHEKKLSSLQPMVPLLEAVIQSTRPLIIVAEDVEGEALATLVVNKLRGGLKIAAVKAPGFGDRRKAMLQDIAILTGGQVISDDLGMKLENVTLDMLGRAKKVTISKENTTIVDGHGDKAEINARVAHIRTQIEETTSDYDREKLQERVAKLAGGVAVIRVGGMTEVEVKERKDRVDDALNATRAAVQEGIIVGGGVALVQAAKKLNDLTGANSDQDAGISIVRRALEAPLRQIAENAGVDGAVVAGKVRESADPAFGFNAQTEEYGDMFGFGVIDPAKVTRTALEDAASIAGLLITTECMIAEKPEPKAAPAGGMGGMGGMDMM

SEQ ID NO: 8356 - protein, 87 aa, Neisseria meningitidis
VAEIHRILMRGGVFMYPQDKRDPAKPGKLRLMYEANPMSLILEQAGASASNAYQAMLDIQPENLHQRVAVFMGSSEEVAYLDRLHAK

SEQ ID NO: 8357 - protein, 496 aa, Staphylococcus aureus subsp. aureus MSSA476
MDDKQHTSSSDDERAEIATSNQDQETNSSKRVHLKRWQFISILIGTILITAVITVVAYIFINQKISGLNKTDQANLNKIENVYKILNSDYYKKQDSDKLSKAAIDGMVKELKDPYSEYLTKEQTKSFNEGVSGDFVGIGAEMQKKNDQIMVTSPMKGSPAERAGIRPKDVITKVNGKSIKGKALDEVVKDVRGKENTEVTLTVQRGSEEKDVKIKREKIHVKSVEYKKKGKVGVITINKFQNDTSGELKDAVLKAHKDGLKKIVLDLRNNPGGLLDEAVKMANIFIDKGKTVVKLEKGKDTEAIQTSNDALKEAKDMDISILVNEGSASASEVFTGALKDYNKAKVYGSKTFGKGVVQTTREFKDGSLLKYTEMKWLTPDGHYIHGKGIKPDVTIDTPKYQSLNVIPNTKTFKVGDDDKNIKTIKIGLSALGYKVDNETTQFDQALENQVKAFQQANKLEVTGEFNKETNNKFTELLVEKANKHDDVLDKLINILK

SEQ ID NO: 8358 - protein, 458 aa, Staphylococcus xylosus
TAGPRGPLLMQDIYFLEQMAHFDREVIPERRMHAKGSGAFGTFTVTNDITKYTCASIFAEVGKQTEMFARFSTVAGERGAGDAERDIRGFALKFYTDEGNWDLVGNNTPVFFFRDPKLFPSLNHVVKRNPKTNMKDPQANWDFWTLLPEALHQITILMTDRGIPKGFRNMHGFGSHTYSMYNDKGERFWVKFHHRTQQGIENYSAEEAEQVMAKDRDSSQRDLFNNIEQGNFPKWKMYIQVMTEEQARNHKDNPFDLTKVWYKDEYPLIEVGEFELNRNPENYFQDVEQAAFAPTNIVPGLDFSPDKMLQGRLFSYGDTQRYRLGVNHWQIPVNQPKGVGMENICPFSRDGQMRILDNNQGASTHYYPNSNGAFEDQPQYKKPALDIQGQAYEYDFREDDDNYFEQPGKLFRLLSSEEQQILFNNTANEMSPVTDALKHRHIRHCYKADPAYGQGVAE

SEQ ID NO: 8359 - protein, 546 aa, Xanthomonas axonopodis pv. citri str. 306
MAAKDIRFGEDARTRMVRGVNVLANAVKATLGPKGRNVVLEKSFGAPTITKDGVSVAKEIELADKFENMGAQMVKEVASKTNDNAGDGTTTATVLAQALIREGAKAVAAGMNPMDLKRGIDQAVKAAVVELKNISKPTTDDKAIAQVGTISANSDESIGNIIAEAMKKVGKEGVITVEEGSGLENELDVVEGMQFDRGYLSPYFINNQQSQSADLDDPFILLHDKKISNVRDLLPVLEGVAKAGKPLLIVAEEVEGEALATLVVNTIRGIVKVVAVKAPGFGDRRKAMLEDMAVLTGGTVISEEVGLALEKATIKDLGRAKKVQVSKENTTIIDGAGDSAAIESRVGQIKTQIEDTSSDYDREKLQERVAKLAGGVAVIKVGASTEIEMKEKKARVEDALHATRAAVEEGVVPGGGVALVRALVAVGDLKGANEDQTHGIQIALRAMEAPLREIVANAGEEPSVILNKVKEGTGNYGYNAANGEFGDMVEFGILDPTKVTRSALQNAASIAGLMITTEAMVADAPKKDEPALPAGGGMGGMGGMDF

SEQ ID NO: 8360 - protein, 265 aa, Digitalis lanata
PTCGVKCLLEEEAIKVGGANHSHATQDLYDSIAAGNYPEWKLFIQTIDPDHEDRFDFDPLDVTKTWPEDILPLQPVGRMVLNKNIDNFFAENEQLAFCPAIVVPGVYYSDDKLLQTRIFSYSDTQRHRLGPNYLQLPANAPKCAHHNNHHEGFMNFMHRDEEVNYFPSRYDPCRHAERFPHPPVALNGKRDRICIEKENNFKQPGEKYRSFPPDRQERFIKRWVDALSDPRLTHEIRSIWVSYWTQADKSLGQKLASRLNIRPTM

SEQ ID NO: 8361 - protein, 450 aa, Staphylococcus xylosus
GPLLMQDIYFLEQMAHFDREVIPERRMHAKGSGAFGTFTVTNDITKYTCASIFAEVGKQTEMFARFSTVAGERGAGDAERDIRGFALKFYTDEGNWDLVGNNTPVFFFRDPKLFPSLNHVVKRNPKTNMKDPQANWDFWTLLPEALHQITILMTDRGIPKGFRNMHGFGSHTYSMYNDKGERFWVKFHHRTQQGIENYSAEKAEQVMAKDRDSSQRDLFNNIEQGNFPKWKMYIQVMTEEQARNHKNNPFDLTKVWYKDEYPLIEVGEFELNRNPENYFQDVEQAAFATTNIVPGLDFSPDKMLQGRLFSYGDTQRYRLGVNHWQIPVNQPKGVGMENICPFSRDGQMRILDNNQGASTHYYPNSNGAFEDQPQYKKPALDIQGQAYEYDFREDDDNYFEQPGKLFRLLSSEEQQILFNNTANEMSPVTDALKHRHIRHCYKADPAYGQG

SEQ ID NO: 8362 - protein, 464 aa, Arabidopsis thaliana
MENKPSVLTDKYDVGRLLGQGTFAKVYYGRSILTNQSVAIKMIDKEKVMKVGLIEQIKREISVMRIARHPNVVELYEVMATKTRIYFVMEYCKGGELFNKVAKGKLRDDVAWKYFYQLINAVDFCHSREVYHRDIKPENLLLDDNENLKVSDFGLSALADCKRQDGLLHTTCGTPAYVAPEVINRKGYDGTKADIWSCGVVLFVLLAGYLPFHDSNLMEMYRKIGKADFKAPSWFAPEVRRLLCKMLDPNPETRITIARIRESSWFRKGLHMKQKKMEKRVKEINSVEAGTAGTNENGAGPSENGADEPTNLNAFDLIALSAGFDLAGLFGDDNKRESRFTSQKPASVIISKLEEVAQRLKLSIRKREAGLFKLERLKEGRKGILSMDAEIFQVTPNFHLVEVKKSNGDTLEYQKLVAEDLRPALSDIVWVWQGEKDELTSQQETEYQQQQQQEQQEQEEPLKF

SEQ ID NO: 8363 - protein, 391 aa, Vigna radiata var. radiata
YFDGWKAYDENPYDELTNPSGVIQMGLAENQVSFDLLEKYLEAHSEASTWGKGAPGFRENALFQDYHGLKTFRTAMASFMEQVRGGRAKFDPQRVVLTAGATAANELLTFILANPGDALLVPTPYYPGFDRDLRWRTGVNIVPIHCDNSNNFQITPEALEAAYKDAEAMKYKVRGVLITNPSNPLGVTIPRSVLEEILDFVTRKNIHLVSDEIYSGSVFSSSEFTSVAEILEGRQYRNAERVHIVYSLSKDLGLPGFRVGTIYSYNDKVDTTARRMSSFTLISSQTQHLLASMLSDKNFTENYIKTNRERLRKRYEMIIEGLKSAGIECLKGNAGLFCWMNMSPVLEKPTREGELELWNAILHEVKLNISPGSSCHCSEPGWFRVCFANMD

SEQ ID NO: 8364 - protein, 481 aa, Arabidopsis thaliana
MALKALDYDTLNENVKKCQYAVRGELYLRASELQKEGKKIIFTNVGNPHALGQKPLTFPRQVVALCQAPFLLDDPNVGMLFPADAIARAKHYLSLTSGGLGAYSDSRGLPGVRKEVAEFIQRRDGYPSNPELIFLTDGASKGVMQILNCVIRGNGDGILVPVPQYPLYSATISLLGGTLVPYYLDESENWGLDVANLRQSVAQARSQGITVRAMVIINPGNPTGQCLSEANIREILKFCYNEKLVLLGDEVYQQNIYQDERPFISSKKVLMEMGSPFSKEVQLVSFHTVSKGYWGECGQRGGYFEMTNLPPRVVEEIYKVASIALSPNVSAQIFMGLMVNPPKPGDISYDQFARESKGILESLRRRARLMTDGFNSCKNVVCNFTEGAMYSFPQIRLPTGALQAAKQAGKVPDVFYCLKLLEATGISTVPGSGFGQKEGVFHLRTTILPAEDEMPEIMDSFKKFNDEFMTQYDNNFGYSKM

SEQ ID NO: 8365 - protein, 296 aa, Zea mays
  misc_feature (88)..(88): Xaa can be any naturally occurring amino acid
METSAATPTRPPHQAATSPSPSPSSSLRLWRPAAQRNMRNQWSHLSAAKEQWLAAVADGRAHASALVNVHLSCRNMPTMDLGVLKDMXGIRDKANSKLALREEQYSGMLLSAYKEMVRQLSYLVEASHSMRRFSKAAPNCPITQFSDRQDNLNDSGDGGGAPVFKWFSVLEFESLAQELVQMFVSEQKLKRLLLLEFLSIALKEGVELQTSLNWGDELYDGESNKLQSIGLQSGDAYSPPENWCAERLGSQRPGNLPLHEVLQVYLTTWHANMNINRSRIDEIFELVEEEMKIKLS

SEQ ID NO: 8366 - protein, 474 aa, Zea mays
  misc_feature (341)..(341): Xaa can be any naturally occurring amino acid
TASAVLCAPRTRLVGSSIQLPPDVDQLPILTTKVKRRVGKYELGRTIGEGTFAKVRFAKNTETGEPVAVKILDKEKVLRHKMAEQIKREISTMKLIKHPNVVRIYEVMGSKTKVYIVLEYVTGGELFDTIANQGRMREGEARSYFQQLINAVDYCHSRGVYHRDLKPENLLLDSYGNLNVSDFGLSALSQQIKDDGLLHTTCGTPNYVAPEVLEDQGYDGAMADLWSCGVILFVLLAGYLPFEDSNLMTLYKKISNAEYTFPPWTSFPAKRLLTRILDPNPMTRITIPEILEDEITIPEILEDEWFKKGYKRPEFDEKYDTPLDDVDAVFNDSEEHHVTEXLISRSAGLNLGNLFDSEQEFKRETRFTSKCPPKETRFTSKCPPKEIIRKIEEAAKPLGFGVQKKNYKLRLEKVKAGRKGNLNVATEVAPSLHMVQVRKAKGDTLEFQKFYKNLSKTLKDVVWKSEDLQMRAAS

SEQ ID NO: 8367 - protein, 639 aa, Alkalilimnicola ehrlichei MLHE-1
MCGITGFWGGPAVDEGIAGRMAARIASRGPDDAGAWRDVKAGVALAHRRLSVIELSPAGHQPMRSPCGRYTLVYNGEIYNHLDLRVALETAGGAPDWRGYSDTETLLAALAHWGVPETLTRLNGMFAFALWDNREATLFLARDRMGEKPLYYGRNGGTFLFGSELKALTAYPGWQGQVDRDALALYLRYNHVPAPRSIYRGIGKLPPAHYVAVRDGGRNVGEPQCYWSLGEIAEQGVMQAGGSAHELADELDGLLRDAVGRRMAADVPLGSFLSGGFDSSMVAAQMQAQSERPVKTFSIGFHEAGYNEADHARAVATHLGTDHTELYITPEEAMAVIPELPAIFDEPFGDSSQIPTYLVSRMAREHVTVSLSGDGGDELFGGYNRHVVGPALWGRLARLPAPLRRGLGRAVGVAARIDRLPGAGRVPQLGEKLDKLASAMRASGGTAFYKDLLSHWKTPATVVRGASEPASLPDRIEAMPNLPGLRERMLYLDMMTYLPDDILTKVDRASMAVSLEARVPLLDHRLVAFAWRVPTDYKVRDGQGKWLFRRVLDRYVPRALMERPKMGFAVPIEHWLRGPLRDWAEVLLDERRLEREGFFHPAPIRRMWAEHLSGRRRHHAPLWNVLMFQAWSERQERIG

SEQ ID NO: 8368 - protein, 467 aa, Vigna radiata
MRLLSTIATCNSHGQDSSYFLGWQEYEKNPYDELHNPKGIIQMGLAENQLSFDLLESWLAKNPDVAGFKRDGKSIFRELALFQDYHGLPSFKKALVDFMSEIRGNKVTFDPNHIVLTAGSTSANETLMFCLAEQGDAFLLPTPYYPGFDRDLKWRTGAEIVPIQCTSSNNFQITEPALKQAYEEARKRNLRVKGLLVTNPSNPLGTTMSRSELNLLVDFIKEKKDTHLISDEIYSGTVFSSPGFVSVMEILKERNDTEEIWNRVHVVYSLSKDLGLPGFRVGAIYSENDTVVAAATKMSSFGLVSSQTQYLLSAMLGDKKFARNYIVENQKRLKRRQRMMVSGLQKAGISCLESNAGLFCWVDMRHLLHSNTFEAEMELWKKIVYQVGLNISPGSSCHCTEPGWFRVCFANMSEETLTLAMKRLKNFVVESTCTQRSALFNGTSKRKSLTKWVFRLSSRDHREQEER

SEQ ID NO: 8369 - protein, 459 aa, Lycopersicon pennellii
MAASVSTIGAASKAPLSLNNSVAGTSVPSTAFFGKSLKKVYAKGVSSPKVSNRNLRVVAQEVDETKEDRWKGLYDNTSDDQQDIARGKGLVDSLFQAPTGTGTHHAIMNSYEYVSQALKTYQLDNKLDGFYIAPAFMDKLVVHITKNFLTLPNIKVPLILGVWGGKGQGKSFQCELVFRKMGINPIMMSAGELESGNAGEPAKLIRQRYREAAEIIRKGNMCCLFINDLDAGAGRMGGTTQYTVNNQMVNATLMNIADNPTNVQLPGMYNKQENARVPIIVTGNDFSTLYAPLIRDGRMEKFYWAPTREDRIGVCKGIFRTDNVPEEAVVKIVDSFPGQSIDFFGALRARVYDDEVRKWVSGTGIELIGEKLLNSRDGPPTFEQPKMTLEKLLEYGNMLVQEQENVKRVQLAETYLKEAALGDANADAINTGISKNFTNLKSRLNNEEAKKARHVNFQE

SEQ ID NO: 8370 - protein, 441 aa, Phaseolus vulgaris
MAASLSTVGAVNRTLLNLNGSGGGASGPSSAFFGTSLKKVISSRVPNSKLTSGSFKIVAADKEIEETQQTEGDRWRGLAYDVSDDQQDITRGKGLVDSLFQAPMDAGTHYAVISSHKYLSAGLRQYNFDNIKDGFYIAPAFLDKLVVHIAKNFMTLPNIKVPLILGVWGGKGQGKSFQCELVFAKMGINPIMMSAGELESGNAGEPAKLIRQRYREASDLIKKGKMCVLFINDLDAGAGRLGGTTQYTVNNQMVNATLMNIADNPTNVQLPGMYNKEDNARVPIIVTGNDFSTLYAPLIRDGRMEKFYWAPTREDRIGVCKGIFRTDGVPEKDIVELVDKHPGQSIDFFGALRARVYDDEVRKWISGVGVDSVGKKLVNSKEGPPTFDQPKMTLDKLLLYASMLVQEQENVKRVQLADQYLNEAALGNANEDAIKSGSFFK

SEQ ID NO: 8371 - protein, 465 aa, Erwinia carotovora subsp. atroseptica SCRI1043
MHDHLQNDFRFPANFWWGSASSAPQTEGESLSYGKSATVWDEWFATQPGRFHQQVGPADTSTFYQHWREDIALLKTLNHNTFRTSISWARLIPDGVGEPNPQAVAFYNQIIDEMLAQGITPFINLFHFDMPMVMQRLGGWENRAVVAAYAGYAATCFRLFGDRVKHWFTFNEPVVPVEGGYLYDFHYPNVVDFKRAATVAYHTMLAHALAVKAYREQSQGGEIGIILNLTPSYPRSQHPADVNAANIADLMFNRSFLDPALKGEYPQELVDLLHRYGQLPNCQPDDRALLADGVVDLLGINYYQPRRIQCRDSLVNPDSPFMPEWFFASYEMPGRKMNPYRGWEIYEPGVYDILTNLRVNYGNPRCFISENGMGVENEQRFDANGQIQDDYRIDFVREHLKQVHKGIAEGSNCLGYHMWTFIDNWSWSNAYKNRYGFVQLDLATQTRTVKKSGEWFATVAAENGF

SEQ ID NO: 8372 - protein, 579 aa, Glycine max
MCGILAVLGCSDSSQAKRVRVLELSRRLKHRGPDWSGLHQYGDNYLAHQRLAIVDPASGDQPLFNEDKTVVVTVNGEIYNHEELRKQLPNHTFRTGSDCDVIAHLYEEHGENFMDMLDGISSFVLLDTRDNSFIVARDAIGVTSLYIGWGLDGSVWISSELKGLNDDCEHFESFPPGHLYSSKERAFRRWYNPPWLSLAIPSAPYDPLALRHAFEKLWIKRLMTDVPFGVLLSGGLDSSLVAAVTARYLAGTKAAKQWGTKLHSFCVGLEGAPDLKATKEVAEYIGTVHHEFHYTVQDGIDAIEDVIYHIETYDVTTIRASIPMFLMSRKIKSLGVKWVISGEGSDVFFGGYLYFHKAPNKEEFHQETCRTIIVLHRYDCSRANKSTFVWGLEARVPFLDKEFIRVAMNIDPECKMIKKEEGRIEKWALRRAFDDEEHPYLPKHILYRQKEQFSDGVGYGWIDGLKAHAEKHVTDRMMLNAANIFPFNTPTTKEAYHYRMIFERFFPQNSCRLTVPGGTSVACSTAKAVEWDAAWSNNLDPSGRAALGVHASAYGNQVKAVEPEKIIPKMEVSPLGVAI

SEQ ID NO: 8373 - protein, 528 aa, Glycine max
MAEVAAPKKENPNLLLGRFELGKLLGHGTFAKVHHARNIKTGEGVAIKIINKEKILKGGLVSHIKREISILRRVRHPNIVQLFEVMATKTKIYFVMEFVRGGELFNKVAKGRLKEEVARKYFQQLVSAVEFCHARGVFHRDLKPENLLLDEDGNLKVSDFGLSAVSDQIRHDGLFHTFCGTPAYVAPEVLARKGYDGAKVDIWSCGVVLFVLMAGYLPFHDRNVMAMYKKIYKGEFRCPRWFSSELTRLFSRLLDTNPQTRISIPEIMENRWFKKGFKQIKFYVEDDRVCSFDEKQLQHHDGDDYLATSDSEVEIRRKNSNCNSTSNGNSLPRPASLNAFDIISFSQGFDLSGLFEEKGDEARFVSSAPVSKIISKLEEVAQLVSFTVRKKDCRVSLEGCREGVKGPLTIAAEIFELTPSLVVVEVKKKGGDKAEYEKFCNSELKPALENLGMEDSASSSSSCHQSTHTQSEFQQQHRTFSDSALNRHSDNNECLYDQELGLAEETSIPQLGEPKFEFQQENVPMFTI

SEQ ID NO: 8374 - protein, 207 aa, Neisseria gonorrhoeae
NISVGTIFSILAKPEGALATESFLQTGRQQLAAGYVLYGPQTQLAFTFGHGVYVFTLNAENEFVLTKENPKVPESTKEFAINMSNRRHWLPPVQQYVDELLAGETGTRGKNYNMRWVASMVAEIHRILMRGGVFMYLQDKRDPSKPGKLRLMYEANPMALILEQAGASASNAYQAMLDIQPESLHQRVAVIMGSSEEVDYLNRLHSK

SEQ ID NO: 8375 - protein, 424 aa, Staphylococcus xylosus
FGTFTVTNDITKYTCASIFAEIGKQTEMFARFSTVAGERGAGDAERDIRGFALKFYTEEGNWDLVGNNTPVFFFRDPKLFPSLNHVVKRNPKTNMKDPQANWDFWTLLPEALHQITILMTDRGIPKGFRNMHGFGSHTYSMYNDKGERFWVKFHHRTQQGIENYTAEEAEQVIAKDRDSSQRDLFNNIEQGNFPKWKMYIQVMTEEQARNHKDNPFDLTKVWYKDEYPLIEVGEFELNRNPENYFQDVEQAAFAPTNIVPGLDFSPDKMLQGRLFSYGDTQRYRLGVNHWQIPVNQPKGVGMENICPFSRDGQMRILDNNQGASTHYYPNSNGAFEDQPQYKKPALDIQGQAYEYDFREDDDNYFEQPGKLFRLLSYEEQQTLFKNTANEMSPVTDALKHRHIRHCYKADSAYGQGVAEAMGID

SEQ ID NO: 8376 - protein, 712 aa, Ustilago maydis 521
MDRFDVINFADLSGPNGGEWVRIGGGSFGVVFKGEYLGTEVAIKEVLPNNTYDVEKYFERECVLMKEARHPNIVQYIGLTKSPGPDGRIYIISEFVGSNVRSYIADKSKPFPWRLRMSFAMDIARALAYLHARNCMHRDLKGENLLITANERIKVCDFGFARIAARNEEEMRRISYCGTDGYMSPEILLGVDFSLPSDVFSLGVIFAEIASRHLVDSYTFKRVMPTFGLDADEVREMASEGCPTAFIQLALDCVAEDPRDRPDMRQVVSRLRDIEREVLLREETENRYAIGSVRGATIQSIMGTKIKRAAPPKLPSFNGALKLNSSYSNAGSDDSGDEIEEALAALEKVGVEPDDARSPVTIKGSSTLKVAGHGNPWWSEDVPDALPSINRSWLASPGAAAERIRHESEAGLLEGADYAESDYSTSVVRSSKMTQRHAPLAMLEERASTLSVRTLRQGDSPLLIPTRRGSADVLAARSGSNDASAMQSYMTARTHRPDPSMALATIASVSSGLNEPIPICHRFTLVKNGTRRPNNVVAAAQQAMASSSTHQHPPPPVSSYYPSLVPPAVMLSNALAKCWVCGKRIGWKPFMDCDDCPYKTHVVCAELAPPTCQDLAIPLSSAVGGGSVQPILSPLNASRRNSKANDIVSCRRSSKAADVGDQREISAAAAALRRASLADSNDEPSSPQIGKAKAKKKLFGGSSAVNKSAVRA

SEQ ID NO: 8377 - protein, 461 aa, Staphylococcus xylosus
TAGPRGPLLMQDIYFLEQMAHFDREVIPERRMHAKGSGAFGTFTVTNDITKYTCASIFAEVGKQTEMFARFSTVAGERGAGDAERDIRGFALKFYTDEGNWDLVGNNTPVFFFRDPKLFPSLNHVVKRNPKTNMKDPQANWDFWTLLPEALHQITILMTDRGIPKGFRNMHGFGSHTYSMYNDKGERFWVKFHHRTQQGIENYSAEEAEQVMAKDRDSSQRDLFNNIEQGNFPKWKMYIQVMTEEQARNHKDNPFDLTKVWYKDEYPLIEVGEFELNRNPENYFQDVEQAAFAPTNIVPGLDFSPDKMLQGRLFSYGDTQRYRLGVNHWQIPVNQPKGVGMENICPFSRDGQMRILDNNQGASTHYYPNSNGAFEDQPQYKKPALDIQGQAYEYDFREDDDNYFEQPGKLFRLLSSEEQQILFNNTANEMSPVTDALKHRHIRHCYKADPAYGQGVAEAMG

SEQ ID NO: 8378 - protein, 216 aa, Magnetospirillum magnetotacticum MS-1
MQIMPDGPNDHLSFDPLDDTKRWPEDQFPLLKCGRMVLDRVPDNFFAEVEQSAFGTGVLVDGIDFSDDKMLQGRTLSYSDTQRYRVGANYLQLPINAPQPGVKVYSNQRDGQMTYGVDGTGPNKHINYEPSTLGQGLAEAPKKKEYHQPVSGNLGRYQTSRTEDDYAQAGHRYRTFEDWEREDLIANLVADMKQCPEPIQLRMVWHFWHADEDYGR

SEQ ID NO: 8379 - protein, 606 aa, Rhodospirillum rubrum
MTRRFGARVEGDGVRFSLWAPAAERVEVVIEGAAESRPVAMVPGGEGWFGAMVGGIGAGALYRFRIDGADLVPDPASRFQPRDVGGPSQVVDASGYAWKTDGWKGRPWAETVLYELHLGTFSRKGTYEGARARLGDLVDLGVSAIELMPLADFVGQRNWGYDGVLPFAPDSVYGTPEQLKALIDAAHGLGLMVFLDVVYNHFGPEGNWLGRYAPSFFTQAHQTPWGAAIDFERPEVRDFFVANALQWLEEYRFDGLRFDAVHAILDAEERHILGEIAVAVREALPADRHVHLVLENDANEARRLIGGTDVVAVRGRYDAQWNDDIHHAFHVVATGETGGYYADYAAQPLAHLGRCLAEGFAYQGESSAHRGGMARGEPTTALPPTAFVAFLQNHDQIGNRALGERLSTLAAPDRLRALRTILLLGPQIPMLFMGEEWSSSRPFLFFCDFHGDLAEAVREGRRREFAAFPQFSTPETRDRIPDPNAPETARACVLDWSERDQPTGAAVLAHHKHLLELRFAKIVPLLGRLRPGGGRCERIGEGGLAVRWGIDDGRDLLMLAQLAEAGSLPGAPPQADLIYRSDGGERAEAPLGPWSVLFALVPETSR

SEQ ID NO: 8380 - protein, 461 aa, Staphylococcus xylosus
TAGPRGPLLMQDIYFLEQMAHFDREVIPERRMHAKGSGAFGTFTVTNDITKYTCASIFAEVGKQTEMFARFSTVAGERGAGDAERDIRGFALKFYTDEGNWDLVGNNTPVFFFRDPKLFPSLNHVVKRNPKTNMKDPQANWDFWTLLPEALHQITILMTDRGIPKGFRNMHGFGSHTYSMYNDKGERFWVKFHHRTHQGIENYSAEEAEQVMAKDRDSSQRDLFNNIEQGNFPKWKMYIQVMTEEQARNHKDNPFDLTKVWYKDEYPLIEVGEFELNRNPENYFQDVEQAAFAPTNIVPGLDFSPDKMLQGRLFSYGDTQRYRLGVNHWQIPVNQPKGVGMENICPFSRDGQMRILDNNQGASTHYYPNSNGAFEDQPQYKKPALDIQGQAYEYDFREDDDNYFEQPGKLFRLLSSEEQQILFNNTANEMSPVTDALKHRHIRHCYKADPAYGQGVAEAMG

SEQ ID NO: 8381 - protein, 459 aa, Staphylococcus xylosus
MTAGPRGPLLMQDIYFLEQMAHFDREVIPERRMHAKGSGAFGTFTVTNDITKYTCASIFAEVGKQTEMFARFSTVAGERGAGDAERDIRGFALKFYTDEGNWDLVGNNTPVFFFRDPKLFPSLNHVVKRNPKTNMKDPQANWDFWTLLPEALHQITILMTDRGIPKGFRNMHGFGSHTYSMYNDKGERFWVKFHHRTQQGIENYSAEEAEQVMAKDRDSSQRDLFNNIEQGNFPKWKMYIQVMTEEQARNHKDNPFDLTKVWYKDEYPLIEVGEFELNRNPENYFQDVEQAAFAPTNIVPGLDFSPDKMLQGRLFSYGDTQRYRLGVNHWQIPVNQPKGVGMENICPFSRDGQMRILDNNQGASTHYYPNSNGAFEDQPQYKKPALDIQGQAYEYDFREDDDNYFEQPGKLFRLLSSEEQQILFNNTANEMSPVTDALKHRHIRHCYKADPAYGQGVAE

SEQ ID NO: 8382 - protein, 306 aa, Glycine max
  misc_feature (159)..(159): Xaa can be any naturally occurring amino acid
MGELTQAEVYSPRTQQVWRALLSWLAFFFQIFFQIIRALGHYPLLSFSSNSSSSSNASSSSSSFKPLPSVEIAEHDSPPPSALEISPLDYSPADHPVPKLTVVLDLDETLVCAYETSSLPAALRTQAIEGGLNWFELECVSIDKEGEGKKINYVTVFEXPGLKEFLKQLSEFADMVLFTAGLEGYARPLVDRIDVENRFSLRLYRPSTISTEYREHVKDLTCISKDLCRIVIVDNNPFSFVLQPVNGIPCIPFSAGQPHDTQLLDVILPLLKQLSEQNDVRPFLYEKFHMPDWFQKQGIPASSWTL

SEQ ID NO: 8383 - protein, 838 aa, Streptococcus pneumoniae TIGR4
MNEAWLDQDYKVFSYEPQPAGTVRVNYYRTDGNYDKKSLWYWGDVKNPSSAQWPDGTDFTATGKYGRYIDIPLNEAAREFGFLLLDESKQGDDVKIRKENYKFTDLKNHSQIFLKDDDESIYTNPYYVHDIRMTGAQHVGTSSIESSFSTLVGAKKEDILKHSNITNHLGNKVTITDVAIDEAGKKVTYSGDFSDTKHPYTVSYNSDQFTTKTSWRLKDETYSYDGKLGADLKEEGKQVDLTLWSPSADKVSVVVYDKNDPDKVVGTVALEKGERGTWKQTLDSTNKLGITDFTGYYYQYQIERQGKTVLALDPYAKSLAAWNSDDSKIDDAHKVAKAAFVDPAKLGPQDLTYGKIHNFKTREDAVIYEAHVRDFTSDPAIAKDLTKPFGTFEAFIEKLDYLKDLGVTHIQLLPVLSYYFVNELKNHERLSDYASSNSNYNWGYDPQNYFSLTGMYSSDPKNPEKRIAEFKNLINEIHKRGMGAILDVVYNHTAKVDLFEDLEPNYYHFMDADGTPRTSFGGGRLGTTHHMTKRLLIDSIKYLVDTYKVDGFRFDMMGDHDAASIEEAYKAARALNPNLIMLGEGWRTYAGDENMPTKAADQDWMKHTDTVAVFSDDIRNNLKSGYPNEGQPAFITGGKRDVNTIFKNLIAQPTNFEADSPGDVIQYIAAHDNLTLFDIIAQSIKKDPSKAENYAEIHRRLRLGNLMVLTAQGTPFIHSGQEYGRTKQFRDPAYKTPVAEDKVPNKSHLLRDKDGNPFDYPYFIHDSYDSSDAVNKFDWTKATDGKAYPENVKSRDYMKGLIALRQSTDAFRLKSLQDIKDRVHLITVPGQNGVEKRM

SEQ ID NO: 8384 - protein, 489 aa, Escherichia coli CFT073
MHLLTLSINPTFLMRSNHFKEFKMDKKQVTDLRSELLDSRFGAKSISTIAESKRFPLHEMRDDVAFQIINDELYLDGNARQNLATFCQTWDDDNVHKLMDLSINKNWIDKEEYPQSAAIDLRCVNMVADLWHAPAPKNGQAVGTNTIGSSEACMLGGMAMKWRWRKRMEAAGKPTNKPNLVCGPVQICWHKFARYWDVELREIPMRPGQLFMDPKRMIEACDENTIGVVPTFGVTYTGNYEFPQPLHDALDKFQADTGIDIDMHIDAASGGFLAPFVAPDIVWDFRLPRVKSISASGHKFGLAPLGCGWVIWRDEEALPQELVFNVDYLGGQIGTFAINFSRPAGQVIAQYYEFLRLGREGYTKVQNASYQVAAYLADEIAKLGPYEFICTGRPDEGIPAVCFKLKDGEDPGYTLYDLSERLRLRGWQVPAFTLGGEATDIVVMRIMCRRGFEMDFAELLLEDYKASLKYLSDHPKLQGIAQQNSFKHT

SEQ ID NO: 8385 - protein, 189 aa, Nymphaea alba
DQHGEVIAECKKPDLEPYLGLHYPATDIPQASRFLFMKNNLRMICDCTAPSVKVIQDKQLEQPLSLCGSTLRSPHGCHAQYMANMGSIASLVMSVVINDHDEEPAIDNSQKGTKLWPLVVCHHTRPRFIPFPLRYACEFLIQVFAVQLNKEVELAAQLREKHILRMQTVLCDMLLRDAPVGIVTRSPNV

SEQ ID NO: 8386 - protein, 310 aa, Kluyveromyces lactis NRRL Y-1140
MSTSNESPSLKLNTGASIPVVGLGTWKSPEEDAYNAVVSALQNGYRHIDTAAIYGNEEAVGKGIRDSGVPREEIFVTTKLWGTQQRDPEAALDLSLQRLGLDYVDLYLIHWPVPLNASSITDGNYLTFPRTADGKIDIDIEEWNFIKTWEKMQHLPKSGKTKAIGVSNFSIKNIEALLAANPDFIVPAANQIEIHPQLPQTELIDYCKSKGILIEAYSPLGSSSSTILTDPTIEGIASKYNAEPANILISWGASRGYVVLPKSVNPQRIKTNLKLLDLSTEDLEKINKLTESVGAKRYVAPDFSPFAIFE

SEQ ID NO: 8387 - protein, 510 aa, Photorhabdus luminescens subsp. laumondii TTO1
MCGIGGVFNTENRLIDDIENKLQTIMSKIAHRGDPSRFNEKVVRNNFSIATNRLAIVERDSAYQPISNQEHDLHLVLNGQIYNYKSLRNELIKQGYQFKNGGDAEVALIAYICYGKSFIKKLDGMFSFILFDNKNNKFLLGRDHVGIKPLYYTQKEGNWYVASEIKSLIEFNSEIKPVEPGSIFDGLTSEKYISYDTTIPASSDNVEQAKEKIYSLLDNAVRKRVDTDLPVSIMFSGGIDSTIVLYLAKKYHHDITAISFGLPGSKDIEIAQRYCTENNIKHIIYTFTQEELINNIQDAIYYGEFFEQIDAIDSTIAHFGYYIANRLGFKIALCGEGSDEIFAGYDLFKTYPDPHHLSLYRLNNLHRTDLQRVDRASMRNTVEARVPFMDSALVPYVLSLDFSYKLNNGIEKYILREAFRGKIPEYIIDRPKIRMPDGSGVKNTIIDYVKDIKCNLPRNMVDSLNSIGLTHQSSLYFAEKYLSLGYPLPKERFKESGKDFSESGYFNFIS

SEQ ID NO: 8388 - protein, 477 aa, Listeria monocytogenes str. 1/2a F6854
MTESKFPKDFLWGGAVAANQCEGAYLEDGKGLSLVDILPTVEDGRWEALFNPSKALATDYGFYPSHESIDFYHRYKEDIKLMAEMGFKCFRMSISWPRIFPNGDETTPNEKGLAFYDAVFDECHKYGIEPVVTINHFDTPLEVFKKYGGWKNRKCIDFYLNFCEAIFTRYKDKVKYWMTFNEINMILHLPYIGGGLDVTKEDNPEEVKYQAAHHQLVASALATKLGHEINPENQIGCMLAAGNTYPMTCNPKDVWKSIEADREGYFFIDVQARGHYPSYTKRFFKEHNINIKMEDGDLDALRDHTVDYVAFSYYSSRLTSADPEKNKETEGNVFATLKNPYLKASEWGWQIDPLGLRITMNTIYDRYQKPLFIVENGLGAVDTVEEDGSITDDYRIDYMREHVREMGEAIEDGVELLGYTPWGCIDLVSAGSGEMKKRYGFIYVDRDNKGNGTLNRSKKKSFDWYKKVIETNGKDID

SEQ ID NO: 8389 - protein, 465 aa, Staphylococcus xylosus
NSMTAGPRGPLLMQDIYFLEQMAHFDREVIPERRMHAKGSGAFGTFTVTNDITKYTCASIFAEVGKQTEMFARFSTVAGERGAGDAERDIRGFALKFYTDEGNWDLVGNNTPVFFFRDPKLFPSLNHVVKRNPKTNMKDPQANWDFWTLLPEALHQITILMTDRGIPKGFRNMHGFGSHTYSMYNDKGERFWVKFHHRTQQGIENYSAEEAEQVMAKDRDSSQRDLFNNIEQGNFPKWKMYIQVMTEEQARNHKDNPFDLTKVWYKDEYPLIEVGEFELNRNPENYFQDVEQAAFAPTNIVPGLDFSPDKMLQGRLFSYGDTQRYRLGVNHWQIPVNQPKGVGMENICPFSRDGQMRILDNNQGASTHYYPNSNGAFEDQPQYKKPALDIQGQAYEYDFREDDDNYFEQPGKLFRLLSSEEQQILFNNTANEMSPVTDALKHRHIRHCYKADPAYGQGVAEAMGI

SEQ ID NO: 8390 - protein, 256 aa, Sinorhizobium meliloti
MAALELDLFLCRTDNYGVLLHDRLSGATASIDAPEERPILDALERRGWQLTHILTTHHHGDHVAANASLKERFGLTIIGPKNEASKIPGIDRTVGHGDRFDFAGHPVDVIETPGHTSGHVCYHLPEDKLLFAADTLFALGCGRLFEGTADTMWQSLSRLMALPDDTAIYFGHEYTLANAHFAITVDPENSALKERAAEIEETRSDGGFTAPTTMGLEKRTNPFLRAGDPKIRALLGMEKASDAAVFAEIRKRKDNF

SEQ ID NO: 8391 - protein, 457 aa, Staphylococcus xylosus
AGPRGPLLMQDIYFLEQMAHFDREVIPERRMHAKGSGAFGTFTVTNDITKYTCASIFAEVGKQTEMFARFSTVAGERGAGDAERDIRGFALKFYTDEGNWDLVGNNTPVFFFRDPKLFPSLNHVVKRNPKTNMKDPQANWDFWTLLPEALHQITILMTDRGIPKGFRNMHGFGSHTYSMYNDKGERFWVKFHHRTQQGIENYSAEEAEQVMAKDRDSSQRDLFNNIEQGNFPKWKMYIQVMTEEQARNHKDNPFDLTKVWYKDEYPLIEVGEFELNRNPENYFQDVEQAAFAPTNIVPGLDFSPDKMLQGRLFSYGDTQRYRLGVNHWQIPVNQPKGVGMENICPFSRDGQMRILDNNQGASTHYYPNSNGAFEDQPQYKKPALDIQGQAYEYDFREDDDNYFEQPGKLFRLLSSEEQQILFNNTANEMSPVTDALKHRHIRHCYKADPAYGQGVAE

SEQ ID NO: 8392 - protein, 791 aa, Ralstonia metallidurans CH34
MRVLCIGGGPAGLYFGLLMKLQNPSHEVIVVERNRPYDTFGWGVVFSDATLENLKQADPVSAAEINAAFNHWDDIDIHIGGRTIRSGGHGFIGIGRKRLLNILQARCEALGVKLVFETDVSDDQALARQYNADLVIASDGLNSRIRTRYAESFQPDIDTRQCRFVWLGTHKLFDAFTFAFEKTEHGWFQAHAYRFDDNTSTFIVEAPEPVWKAAGIEQMSQEEGVAYCEKLFAKYLDGNKLISNAAHLRGSAIWIRFPRVICHHWVHWNTLDDGRRVPVVLMGDAAHTAHFSIGSGTKLALEDAIDLAEAIGEHRAAGVDGLPEALARYEATRSVEVLKIQNAARNSTEWFENVERYAGMAPEQFAYSLLTRSQRISHENLRVRDAQYVDNFEQWLAAQAGVPQETLKLRAAAGDAALPPMFTPFTVRGVTLKNRVVVSPMAMYSSVDGVPGDFHLVHLGSRALGGAGMVVAEMTCVSPDARITPGCPGLWNDAQRDAWKRIVDFVHANGDTKIAMQLGHAGRKGSTQLGWEKMDYPLADGNWPLISASALPYMPDVSQVPREMTREDMDRVRDDFVANARRAAEAGFDWLELHCAHGYLLSSFISPLTNTRTDAYGGLLANRLRYPLEVFAAVRAVWPQDKPMSVRISAHDWVEGGITADDAVEIARAFKAAGADMIDCSSGQVSPDQTPVYGRMYQTPFADRIRNEAGIPTIAVGAIFEADHVDSIVAAGRADLCAIARPHLADPAWTLHEAARLGYRDVTWPKQYVSGKRQLETNLARAASYAQQPGK

SEQ ID NO: 8393 - protein, 455 aa, Staphylococcus xylosus
GPRGPLLMQDIYFLEQMAHFDREVIPERRMHAKGSGAFGTFTVTNDITKYTCASIFAEVGKQTEMFARFSTVAGERGAGDAERDIRGFALKFYTDEGNWDLVGNNTPVFFFRDPKLFPSLNHVVKRNPKTNIKDPQANWDFWTLLPEALHQITILMTDRGIPKGFRNMHGFGSHTYSMYNDKGERFWVKFHHRTQQGIENYSAEEAEQVMAKDRDSSQRDLFNNIEQGNFPKWKMYIQVMTEEQARNHKDNPFDLTKVWYKDEYPLIEVGEFELNRNPENYFQDVEQAAFAPTNIVPGLDFSPDKMLQGRLFSYGDTQRYRLGVNHWQIPVNQPKGVGMENICPFSRDGQMRILDNNQGASTHYYPNSNGAFEDQPQYKKPALDIQGQAYEYDFREDDDNYFEQPGKLFRLLSSEEQQILFNNTANEMSPVTDALKHRHIRHCYKADPAYGQGVA

SEQ ID NO: 8394 - protein, 452 aa, Staphylococcus xylosus
GPLLMQDIYFLEQMAHFDREVIPERRMHAKGSGAFGTFTVTNDITKYTCASIFAEVGKQTEMFARFSTVAGERGAGDAERDIRGFALKFYTDEGNWDLVGNNTPVFFFRDPKLFPSLNHVVKRNPKTNIKDPQANWDFWTLLPEALHQITILMTDRGIPKGFRNMHGFGSHTYSMYNDKGERFWVKFHHRTQQGIENYSAEEAEQVMAKDRDSSQRDLFNNIEQGNFPKWKMYIQVMTEEQARNHKDNPFDLTKVWYKDEYPLIEVGEFELNRNPENYFQDVEQAAFAPTNIVPGLDFSPDKMLQGRLFSYGDTQRYRLGVNHWQIPVNQPKGVGMENICPFSRDGQMRILDNNQGASTHYYPNSNGAFEDQPQYKKPALDIQGQAYEYDFREDDDNYFEQPGKLFRLLSSEEQQILFNNTANEMSPVTDALKHRHIRHCYKADPAYGQGVA

SEQ ID NO: 8395 - protein, 545 aa, Heliobacillus mobilis
MAKMTVFNEEARRALEKGVNTLAEAVRVTLGPKGRNVVLEKKFGSPLITNDGVTIAKEIELENPIENMGAQLVKEVATKTNDVAGDGTTTATILAQAIIREGMKNVAAGANPMVIKRGIEKAVATCVEEIKNLSKPVESKEAIAQVASISAADATIGSLIAEAMEKVGKDGVITVEESKGFSTDLEVVEGMNFDRGYISPYMITDPDKMEAVLNDPYILITDKKISAIKDILPVLERIVQSGKQLMIISEDIEGEALATLVVNKLRGTFTCVGVKAPGFGDRRKAMLEDIAILTGGRVVSEEVGLKLENATMDMLGRARQVRISKEETIIVDGAGSQDDIKARIAQIRRQYEESTSEFDKEKLQERLAKLAGGVAVIQVGAATETELKEKKLRIEDALNATRAAVEEGIVPGGGTALVSIQKALDEVEVPAGDEATGVAIIKRSLEEPLRQIANNAGYEGSVVVEKVKNLPKGQGFNAATEVYEDMIAAGIVDPAKVTRSALQNAASIAAMLLTTEAIVADKPEKKEAPGMPGGMPGMGGMDMGM

SEQ ID NO: 8396 - protein, 206 aa, Zea mays
MASRRRTLLKVIILGDSGVGKTSLMNQYVNKKFSNQYKATIGADFLTKEVQFEDRLFTLQIWDTAGQERFQSLGVAFYRGADCCVLVYDVNSMKSFDNLNNWREEFLIQASPSDPDNFPFVLLGNKVDVDGGNSRVVSEKKAKAWCACKGNIPYFETSAKDGTNVEDAFQCIVKNALKNEPEEELYVPDTVDVVGGNRAQRSSGCC

SEQ ID NO: 8397 - protein, 462 aa, Staphylococcus xylosus
TAGPRGPLLMQDIYFLEQMAHFDREVIPERRMHAKGSGAFGTFTVTNDITKYTCASIFAEVGKQTEMFARFSTVAGERGAGDAERDIRGFALKFYTDEGNWDLVGNNTPVFFFRDPKLFPSLNHVVKRNPKTNIKDPQANWDFWTLLPEALHQITILMTDRGIPKGFRNMHGFGSHTYSMYNDKGERFWVKFHHRTHQGIENYSAEEAEQVMAKDRDSSQRDLFNNIEQGNFPKWKMYIQVMTEEQARNHKDNPFDLTKVWYKDEYPLIEVGEFELNRNPENYFQDVEQAAFAPTNIVPGLDFSPDKMLQGRLFSYGDTQRYRLGVNHWQIPVNQPKGVGMENICPFSRDGQMRILDNNQGASTHYYPNSNGAFEDQPQYKKPALDIQGQAYEYDFREDDDNYFEQPGKLFRLLSSEEQQILFNNTANEMSPVTDALKHRHIRHCYKADPAYGQGVAEAMGI

SEQ ID NO: 8398 - protein, 553 aa, Escherichia coli
ASIFGVFDIKTDAVELRKKALELSRLMRHRGPDWSGIYASDNAILAHERLSIVDVNAGAQPLYNQQKTHVLAVNGEIYNHQALRAEYGDRYQFQTGSDCEVILALYQEKGPEFLDDLQGMFAFALYDSEKDAYLIGRDHLGIIPLYMGYDEHGQLYVASEMKALVPVCRTIKEFPAGSYLWSQDGEIRSYYHRDWFDYDAVKDNVTDKNELRQALEDSVKSHLMSDVPYGVLLSGGLDSSIISAITKKYAARRVEDQERSEAWWPQLHSFAVGLPGSPDLKAAQEVANHLGTVHHEIHFTVQEGLDAIRDVIYHIETYDVTTIRASTPMYLMSRKIKAMGIKMVLSGEGSDEVFGGYLYFHKAPNAKELHEETVRKLLALHMYDCARANKAMSAWGVEARVPFLDKKFLDVAMRINPQDKMCGNGKMEKHILRECFEAYLPASVAWRQKEQFSDGVGYSWIDTLKEVAAQQVSDQQLETARFRFPYNTPTSKEAYLYREIFEELFPLPSAAECVPGGPSVACSSAKAIEWDEAFKKMDDPSGRAVGVHQSAYK

SEQ ID NO: 8399 - protein, 387 aa, Aspergillus nidulans FGSC A4
MAHQDSKLFQPLAINNGNITLKHRVVHAPLTRNRGVPESPVSTPEKPNRVWYPGDLSNGMPGVPGLFTPSQIAGWKRVVDAVHEKGGYIYAQLWHAGRATIPQMTGSPAVSASATVWDDPTECYSHPPVGATERVPYSAHPPIELTVDHIKRTIADYCAAAKAAMEAGFDGVEVHGGNGYLPEQFLSSNINKRTDEYGGSPEKRCRFVLELMDELAKTIGEENLAIRLSPFGLFNQARGEQRMETWTHLCKELKRTHPTLSYVSFIEPRYEQIFSTAEKDAFLSSWGLSNVDLTSFREIFGDTPFFSAGGWDQTNSWGVLESGRYDALLYGRYFTSNPDLVERLRTGTPFAPYDRSRFYGPFEDNRICYTDYPPATGHTDIRIEIQQ

SEQ ID NO: 8400 - protein, 740 aa, Cucumis melo var. cantalupensis
MENCYCIEPQWPADELLMKYQYISDFFIALAYFSIPLELIYFVKKSAVFPYRWVLVQFGAFIVLCGATHLINLWTFTMHSRTVAVVMTTAKVLTAVVSCATALMLVHIIPDLLSVKTRELFLKNKAAELDREMGLIRTQEETGRHVRMLTHEIRSTLDRHTILKTTLVELGRTLALEECALWMPTRTGLELQLSYTLHQQNPVGYTVPINLPVISQVFSSNRALKISPNSPVASLRPRAGRYVAGEVVAVRVPLLHLSNFQINDWPELSTKRYALMVLMLPSDSARQWRVHELELVEVVADQVAVALSHAAILEESMRARDLLMEQNVALDLARREAETAIRARNDFLAVMNHEMRTPMHAIIALSSLLQETELTPEQRLMVETILKSSNLLATLINDVLDLSRLEDGSLQLDIGTFNLHAVFKEVLNLIKPVTLVKKLSLTLHLGPDLPVFAVGDEKRLMQAILNVVGNAVKFSKEGSISISAIVAKSETFREIRVPDFHPVPSDSHFYLRVQVKDTGSGISPQDIPKLFTKFAQTTVGPRNSGGSGLGLAICKRFVNLMEGHIWLESEGLGKGCTATFIVKLGIADQSNESKLPYTSKIHENSIHTSFPGLKVLVMDDNGVSRSVTKGLLVHLGCEVTTAGSIEEFLRVVSQEHKVVFMDICTPGVDGYELAIRIREKFAKCHERPFMVVLTGNSDKVTKESCLRAGMDGLILKPVSIDKMRSVLSELIERRVLFETS

SEQ ID NO: 8401 - protein, 161 aa, Arabidopsis thaliana
MSLIPSIFGGRRSNVFDPFSQDLWDPFEGFFTPSSALANASTARDVAAFTNARVDWKETPEAHVFKADLPGLKKEEVKVEVEDKNVLQISGERSKENEEKNDKWHRVERASGKFMRRFRLPENAKMEEVKATMENGVLTVVVPKAPEKKPQVKSIDISGAN

SEQ ID NO: 8402 - protein, 805 aa, Arabidopsis thaliana
MVVIHGVSLTPRFTLPSRPLNTGFNAGNSTLSFFFKKHPLSRKIFAGKQSAEFDSSSQAISASEKVLVPDNLDDDPRGFSQIFDLESQTMEYTEAVRTEDQTMNVVKERGVKPRIVPPPGDGKKIYEIDPMLRTYNNHLDYRYGQYKRLREEIDKYEGGLEAFSRGYEKLGFSRSDAGITYREWAPGAKAASLIGDFNNWNSNADIMTRNEFGVWEIFLPNNTDGSPAIPHGSRVKIRMDTPSGIKDSIPAWIKFSVQAPGEIPFNGIYYDPPEEEKYVFKHPQPKRPKSLRIYEAHVGMSSTEPMVNTYANFRDDVLPRIKKLGYNAVQIMAIQEHSYYASFGYHVTNFFAPSSRCGTPEELKSLIDRAHELGLVVLMDIVHSHASKNTLDGLNMFDGTDAHYFHSGPRGYHWMWDSRLFNYGSWEVLRYLLSNARWWLEEYKFDGFRFDGVTSMMYTHHGLSVGFTGNYTEYFGLETDVDAVNYLMLVNDMIHGLYPEAITVGEDVSGMPTFCIPVQDGGVGFDYRLHMAIADKWIEMLKKRDEDWQMGDIIYTLTNRRWSEKCISYAESHDQALVGDKTIAFWLMDKDMYDFMAVDRPSTPLIDRGIALHKMIRLITMGLGGEGYLNFMGNEFGHPEWIDFPRGEQRLSDGSVIPGNNFSYDKCRRRFDLGDADYLRYRGLQEFDQAMQHLEENYGFMTSEHQFISRKDEADRVIVFERGDLVFVFNFHWTSSYFDYRIGCSKPGKYKIVLDSDDPLFGGFNRLDRKAEYFTYDGLYDERPCSFMVYAPCRTAVVYALANHD

SEQ ID NO: 8403 - protein, 771 aa, Ralstonia eutropha JMP134
MKLQDPANEVIVAERNRPYDTFGWGVVFSDATMDNLKVADPVSAAEINEAFNHWDDIDVHIGGRTIRSGGHGFIGIGRKRLLNILQARCEALGVKLVFETDVSDDQALAMQYQADLVIASDGLNSRIRTRYAGTFQPDIDTRQCRFVWLGTHKLFDAFTFAFEKTEHGWFQAHAYRFDDNTSTFIVETPQEVWSAAGIEQMSQEEGIAYCEKLFAKYLDGNKLISNATHLRGSANWIRFPRVICKHWVHWNTLPDGRRVPVVLMGDAAHTAHFSIGSGTKLALEDAIDLATEIAASGPSAHDALPAALERYAATRSVEVLKIQNAARNSTEWFENVERYASLAPEQFAYSLLTRSQRISHENLRVRDAGYVRKFEHWLAGEAGVPAESLRLREDKPVPPMFTPYRVRGVTLKNRVVVSPMAMYSSVDGVPGDFHLVHLGSRALGGAGMVVAEMTCVSPDARITPACPGLWNDAQRDAWKRIVDFVHANSDARIAMQIGHAGRKGSTQLGWEKMDHPLPHGNWPLFSASPIPYLPGESQVPREMTREDMDRVRDDFVGAARRAAEAGFDWLELHCAHGYLLSSFISPLSNQRTDEYGGTLANRLRYPLEVFAAVREVWPADKPMSVRISAHDWVEGGITPDDAVEIARAFKAVGADMIDCSSGQVSPDQAPVYGRMYQTPFADRIRNEADIPTIAVGAIFEADHVDSIIAAGRADLCAVARPHLADPAWTLHEAAKLGYRDVSWPRQYEAGKRQLETNLERAAALARAVVEH

SEQ ID NO: 8404 - protein, 546 aa, Tetragenococcus halophilus
MAKDIKFSEDARRSMLNGVSKLADTVKVTLGPRGRNVVLEKSYGSPLITNDGVTIAKEIELENRFENMGAQLVSEVASKTNDIAGDGTTTATVLAQSIVSEGLKNVTSGANPLGIRRGIEQATQKAVEELQNISTPVESKEAIVQVGEVSSGSKQVGQYIADAMDKVGNDGVITIEDSQGIDTELDVVEGMQFDRGYLSQYMVTDNEKMEADLDSPYILITDKKISNIQDILPLLEQVVQESKPLLIIADDIDGEALPTLVLNKIRGTFNVVATKAPGFGDRRKAMLEDIAVLTGATVITEDLGLELKDATMDSLGKANKVTVDKDNTTIVEGAGDSTAIEDRVQLIKNQVAETTSDFDREKLQERLAKLAGGVAVIKVGAATETEQKELKLRIEDALNAARAGVEEGMVSGGGTALVNVINKVAELDADDDAITGVNIVLRALEEPVRQISENAGFEGSVIIEKLKSEKLGIGFNAATGQWVNMVDAGIVDPTKVVRSALQNAASISALLLSTEAVIADRPDESGNDAGAGAQGMDPSMMGGGMM

SEQ ID NO: 8405 - protein, 393 aa, Cryptococcus neoformans var. neoformans JEC21
MTVIQSPKLFTPIQVGEYELKHRIVMAPLTRLRAETKTAIPSEWAETYYSQRASDGGLIVSEGTFIAEELRGYENVPGIYTPEQIAVWKKITSGVHSKGGRIFCQLWVLGRVADPNVIPVIYSVGTIRDDSPSYIAAPEPEGQRKPLTPVTEADMDRFIGHYIQASKNAIEAGFDGVEIHGANGYFIDQFLQTNSNDRTDQYGGSLENRMRFPLRVLNAVCDAIGPKRVGIRMSPFSEFQSMRMEDPLATFVPWAQAIVEAQPELAFIHAVEGRGILTPENEWYIQDNLNPIREVILNKGKSVRFIPAGGYMPDTAFEHAEKYPEDLIAFGRYFISNPDLPNRVRNGWPLHKYDRTTFYSQSSVGYNDYKDYKPETEALAQDEAAPKEGTTKA

SEQ ID NO: 8406 - protein, 679 aa, Pseudomonas syringae pv. syringae B728a
MTAAHYPHLLAPLDLGFTTLRNRTLMGSMHTGLEERPGGFERMATYFAERARGGVGLMVTGGIAPNEEGGVYDGAAKLTNAKEAERHRIVTQAVHDAGGKICLQILHAGRYAYSRKQVAPSAIQAPINPFTPRELDEEGIEKQIADFVTCSTLARSAGYDGVEIMGSEGYFINQFLAAHTNHRTDRWGGSYENRMRLAVEIVRRVREAVGAQFIIIFRLSMLDLVEGGSSWEEIVELAKAVEQAGATLINTGIGWHEARIPTIATKVPRAAFSKVTAKLRGSVSIPLITTNRINTPEVAERILSEGDADMVSMARPFLADPEFVNKAAAGHAERINTCIGCNQACLDHTFGGKLTSCLVNPRACHETELNYLPTLQIRKIAVVGAGPAGLAAATVAAQRGHEVTLFDSASEIGGQFNIAKRVPGKEEFAETLRYFRNKVQETGVQLRLGNRVKAADLLDAGFDEVILATGIAPRTPAIPGIDNPMVLSYLDVILQRKPVGRRVAVIGAGGIGFDVSEFLVHQGVATSLDREAFWKEWGIDMTLQARGGVAGVKPEVHAPARQVFLLQRKSSKVGDGLGKTTGWIHRTGLKNKQVQMLNAVQYLKIDDAGLHIRIGEDGEEKLLAVDNVVICAGQDPLRELYDDLLNAGQSVHLIGGADVAAELDAKRAIDQGSRLAATL

SEQ ID NO: 8407 - protein, 459 aa, Streptococcus pneumoniae TIGR4
MLRFPKDFVWGSSTSGPQTEGRVAGDGKGDNLWDYWFQVEPNRYYNGIGSDKTSTFYENWERDIELLLETGHTAFRTSIQWSRIFPQGCGKVNTQGVDFYRKVFEAIKAKGIRLLVNLYHFDLPFALQEDGDGWENKATVSAYEDYARFCFETYGDLVDQWITFNEPIVPVEFGYFYDAHYPHKVDAEAAVKVAYHTQLASSRAVKACHELLPDSKIGIVLNLTPAYPRSQHPADVKAARIAALFQAQSFLDPSVLGTYPQELVEILHEHGLLPDATEEELELIRDNTVDFLGVNYYQPLRVMAPRFAKHPESPLLPEHFYEPYVMPGRKINSHRGWEIYEQGIYDIAQNIKENYGNIEWMLTENGMGVEGEEKFRQDGMIQDDYRIDFVKGHLRELHRAIEDGANCKGYLIWTFIDCWSWLNSYKNRYGLVELDLETQERRLKKSGHWFKELSDNNGF

SEQ ID NO: 8408 - protein, 538 aa, Chlorobium tepidum TLS
MSRIFTVIIMLLIGGFGYFIGWRMNSGTGGKMVDTYNLIRSYYVDPVNADSLQSAGVRGMLQSLDPHSIYLEPEKAAITQSNFNGNFEGIGVEFDVVRDTLLVVTPLAGGPSESAGIMPGDRIIGIDSKNVIGIKPSAVLGKLRGERGTRVRLRIYRPLTRRTIDFLVTRGKISTSSIDAAFLDDARTGYIRISQFVETTGSEFHNAVQKLRDKGMRKLIIDVRGNPGGYLDQAVAVADELLPAGKLIVYTKSRHGGDDQMKYLSTSGGIFEKGEVCLLVDRGSASAAEILAGALQDNRRALLIGELTFGKGLVQRQFKLPDDSVVRLTVSRYFTPSGRQIQREYDDGLQGRERYYKEMFTRNLPGGFIKKYGDLMYREGQNISVYSTGSLLKNTAADSLRAVLAKAGGIMPDYWVFGKPYSNLYQELYAKGVIEDIALKLIDDPSDPVQKYRSSATSYLDGYHVPVNLEALVRKECAEAKVQFNQAEFDRDRADIALALKARVARHLFGTEEQIRVLVSEGDPVMKVARHFIEKSAS

SEQ ID NO: 8409 - protein, 799 aa, Zea mays
MAFRVSGAVLGGAVRAPRLTGGGEGSLVFRHTGLFLTRGARVGCSGTHGAMRAAAAARKAVMVPEGENDGLASRADSAQFQSDELEVPDISEETTCGAGVADAQALNRVRVVPPPSDGQKIFQIDPMLQGYKYHLEYRYSLYRRIRSDIDEHEGGLEAFSRSYEKFGFNASAEGITYREWAPGAFSAALVGDVNNWDPNADRMSKNEFGVWEIFLPNNADGTSPIPHGSRVKVRMDTPSGIKDSIPAWIKYSVQAPGEIPYDGIYYDPPEEVKYVFRHAQPKRPKSLRIYETHVGMSSPEPKINTYVNFRDEVLPRIKKLGYNAVQIMAIQEHSYYGSFGYHVTNFFAPSSRFGTPEDLKSLIDRAHELGLLVLMDVVHSHASSNTLDGLNGFDGTDTHYFHSGPRGHHWMWDSRLFNYGNWEVLRFLLSNARWWLEEYKFDGFRFDGVTSMMYTHHGLQVTFTGNFNEYFGFATDVDAVVYLMLVNDLIHGLYPEAVTIGEDVSGMPTFALPVHDGGVGFDYRMHMAVADKWIDLLKQSDETWKMGDIVHTLTNRRWLEKCVTYAESHDQALVGDKTIAFWLMDKDMYDFMALDRPSTPTIDRGIALHKMIRLITMGLGGEGYLNFMGNEFGHPEWIDFPRGPQRLPSGKFIPGNNNSYDKCRRRFDLGDADYLRYHGMQEFDQAMQHLEQKYEFMTSDHQYISRKHEEDKVIVFEKGDLVFVFNFHCNNSYFDYRIGCRKPGVYKVVLDSDAGLFGGFSRIHHAAEHFTADCSHDNRPYSFSVYTPSRTCVVYAPVE

SEQ ID NO: 8410 - protein, 240 aa, Triticum aestivum
MGRGKIVIRRIDNSTSRQVTFSKRRNGIFKKAKELGILCDAEVGLVIFSSTGRLYEYASSSMKSVIDRYGRAKEEQQLVANPNSELKFWQREAASLRQQLHNLQENHRQLTGQDLSGMGVKELQTLENQLEISLRCIRTKKDQILIDEIHELNHKGSLVHQENMELYRKINLIRQENAELQKKLSETEAATEVNRDSRTPYNFAVVEDANVSVDLELNSPQQQNDVEHTAPPKLGLQLHP

SEQ ID NO: 8411 - protein, 283 aa, Zea mays
  misc_feature (122)..(122): Xaa can be any naturally occurring amino acid
  misc_feature (261)..(261): Xaa can be any naturally occurring amino acid
RLAVRGSSGMEWADERAGGAEGLAGYVKVMTDEQMEVLRKQISIYATICEQLVEMHRALTEHQDTIAGIRFSNLYCDPQIIPGGHKITARARWQPTPMQLQILENIFGNQHQCSSASWRTSXDQGNGTPSKQRIKEITAELSHHGQISETNVYNWFQNRRARSKRKQAASLPNNAESEAEVDEESLTDKKPKSDRSLQDNKAMGAHNADRISGMHHLDTDHDQIGGMMYGCNDNGLRSSGSSGQMSFYGNIMPNPRIDHFXGKVESSRSFSHLQHGEGFDMFG

SEQ ID NO: 8412 - protein, 209 aa, Phaseolus lunatus
PESLHMFSFLFDDVGIPQDYRHMDGFGVNTYTLISKAGKPHYVKFHWKATCGEKCLLDEEAVRVGGSNHSHATQDLYDSIAAGNYPEWKLYILTLDPEQEDKFDFDPLDVTKIWPEDVLPLQPVGRMVLNKNIDNFFAENEQLAFCPAIIVPGVYYSDDKLLQTRIFSYADSQRHRLGPNYLQIPANAPKCAHHNNHHEGFMNFMHRDE

SEQ ID NO: 8413 - protein, 368 aa, Yarrowia lipolytica CLIB122
MTQTHNLFSPIKVGSSELQNRIVLAPLTRTRALPGNVPSDLATEYYAQRAASPGTLLITEATYISPGSAGVPIPGDGIVPGIWSDEQLEAWKKVFKAVHDRGSKIYVQLWDIGRVAWYHKLQELGNYFPTGPSAIPMKGEESEHLKALTHWEIKGKVALYVNAAKNAIAAGADGVEIHSANGYLPDTFLRSASNQRTDEYGGSIENRARFSLEIVDAITEAIGADKTAIRLSPWSTFQDIEVNDTETPAQFTYLFEQLQKRADEGKQLAYVHVVEPRLFGPPEPWATNEPFRKIWKGNFIRAGGYDRETALEDADKSDNTLIAFGRDFIANPDLVQRLKNNEPLAKYDRTTFYVPGAKGYTDYPAYKM

SEQ ID NO: 8414 - protein, 266 aa, Ralstonia metallidurans CH34
MLKVEPIPAFQDNYIWAIHDGHSAAVVDPGEAAPVEQFLAQRGLALGAIVITHHHGDHQGGVSDLLARHPSGPNGEPLPVIGPQGERIGHRTQAVREGDTVTLRHPAVTFRVLDVPGHTAGHVAYVGDLPGAGPVVFCGDTLFASGCGRLFEGTPAQMLASLDKLAALPGDTRVYCAHEYTRSNVRFAQAVEPANPDLAAWAARVDILREAGTPTVPTTVAHERAVNPFLRSRESTVRQAVRAQGGDVSGDAAAFGALRGWKDGFR

SEQ ID NO: 8415 - protein, 451 aa, Staphylococcus xylosus
GPLLMQDIYFLEQMAHFDREVIPERRMHAKGSGAFGTFTVTNDITKYTCASIFAEVGKQTEMFARFSTVAGERGAGDAERDIRGFALKFYTDEGNWDLVGNNTPVFFFRDPKLFPSLNHVVKRNPKTNMKDPQANWDFWTLLPEALHQITILMTDRGIPKGFRNMHGFGSHTYSMYNDKGERFWVKFHHRTQQGIENYSAEEAEQVMAKDRDSSQRDLFNNIEQGNFPKWKMYIQVMTEEQARNHKDNPFDLTKVWYKDEYPLIEVGEFELNRNPENYFQDVEQAAFAPTNIVPGLDFSPDKMLQGRLFSYGDTQRYRLGVNHWQIPVNQPKGVGMENICPFSRDGQMRILDNNQGASTHYYPNSNGAFEDQPQYKKPALDIQGQAYEYDFREDDDNYFEQPGKLFRLLSSEEQQILFNNTANEMSPVTDALKHRHIRHCYKADPAYGQGV

SEQ ID NO: 8416 - protein, 542 aa, Streptomyces avermitilis MA-4680
MAKILKFDEDARRALERGVNKLADTVKVTIGPKGRNVVIDKKFGAPTITNDGVTIAREVEVEDPYENLGAQLVKEVATKTNDIAGDGTTTATVLAQALVREGLKNVAAGASPALLKKGIDAAVKAVSEELLATARPIDEKSDIAAVAGLSAQDSQVGELIAEAMDKVGKDGVITVEESNTFGLELDFTEGMAFDKGYLSPYFVTDQERMEAVLEDPYILIHQGKISSIQDLLPLLEKVIQANASKPLLIIAEDVEGEALSTLVVNKIRGTFNAVAVKAPGFGDRRKAMLGDIATLTGGQVIAEEVGLKLDQVGLDVLGTARRVTVTKDDTTIVDGGGSSDEVAGRINQIKAEIENTDSDWDREKLQERLAKLAGGVCVIKVGAATEVELKEKKHRLEDAISATRAAVEEGIVSGGGSALVHAVKVLEGNLGKTGDEATGVAVVRRAAVEPLRWIAENAGLEGYVITSKVAELDKGQGFNAATGEYGDLVKSGVIDPVKVTRSALENAASIASLLLTTETLVVEKPAEEEADAGHGHGHGHSH

SEQ ID NO: 8417 - protein, 514 aa, Aspergillus oryzae
MVHLAQVHRNADLDSTIKRVDSIQLENTDEDGFYSSVYGTRFATEQLPQTEMPEREMPREVAYRMIKDELSLDGNPMLNLASFVTTYMEDEAEKLMTESFSKNFIDYEEYPQSAEIQNRCVNMIARLFNAPVHSEDEHPMGTSTIGSSEAIMLGTLAMKRRWQNKRKAEGKDYSRPNIVMNSAVQVCWEKAARYFDVEERYVYCTEDRYVIDPQQAVDLVDENTIGICAILGTTYTGEYEDVKAINDLLIERNIDVPIHVDAASGGFVAPFINPKLEWDFRLPKVVSINVSGHKYGLVYPGVGWVVWRSPEYLPKDLIFNINYLGAEQASFTLNFSKGASQVIGQYYQMIRLGKRGYRSIMTNITVTADFLAQELEKMGFIIMSQRRGHGLPLVAFRLPAEREGQFDEFALAHQLRERGWIVPAYTMAPNSNNLKLMRVVVREDFTKSRCDALLSDIKLGLKTLGDMDKAMLDKYTQHVRTHATHSHKSKHNHPHYKGETHSLQGKHGKTHGVC

SEQ ID NO: 8418 - protein, 268 aa, Bifidobacterium longum DJO10A
MLNNGTVIPQVGLGVFQTPDGDTTVNAVQTALENGYRHIDTAMIYHNEASVGEGIRRAGVPRSDFFLTTKLWNDDIRARCGKDAFQESLDRLGVDYVDLYLIHWPADGWQQAWDDLQEIYASGRAKAIGVSNFQKHHIDELLTHSDVVPAVDQVESSPQFTNQELIGQLRAKGIHTEAWSPLGGTGGNLLSNPVLAGIGAKYGRSAAQVVIRWHIQRGIVVLPKSTHAERIKQNFEVFDFNLSVDDMTAISAINTGKRNGADPDNFNF

SEQ ID NO: 8419 - protein, 484 aa, Arabidopsis thaliana
  misc_feature (103)..(103): Xaa can be any naturally occurring amino acid
  misc_feature (132)..(132): Xaa can be any naturally occurring amino acid
  misc_feature (154)..(154): Xaa can be any naturally occurring amino acid
  misc_feature (159)..(159): Xaa can be any naturally occurring amino acid
  misc_feature (246)..(246): Xaa can be any naturally occurring amino acid
  misc_feature (420)..(420): Xaa can be any naturally occurring amino acid
MAAAVSTVGAINRAPLSLNGSGSGAVSAPASTFLGKKVVTVSRFAQSNKKSNGSFKVLAVKEDKQTDGDRWRGLAYDTSDDQQDITRGKGMVDSVFQAPMGTXGTHHAVLSSYGYGSQGLRQYNLGNMMDGXYIAPAFMASFFVQYQDFLTLPXIKVPXLGFGGKGQGKSFPCELVMAKMGINPIMMSAGELESGNAGEPAKLIRQRYREAADLIKKGKMCCLFINDLDAGAGRMGGTTQYTVNNXDNPTNVQLPGMYNKEENARVPIICTGNDFSTLYAPLIRDGRMEKFYWAPTREDPIGVCQGIFRTDKIKDEDIVTLVDQFPGQSIDFFGALRARVYDDEVRKFVESLGVEKIGKRLVNSREGPPVFEQPEMTYEKLMEYGNMLVMEQENAKRAQLVETYLTRPALGDPNADAIGXVATPHRKGAQLAQPAATEGCPGPAAETHAPRPLAPIVLGPHSLSLSPVFSTSRPHLYALPPPPP

SEQ ID NO: 8420 - protein, 682 aa, Gloeobacter violaceus PCC 7421
MQHPNRLSSLLPSLDQAMETRVKLVTPDTVLSDIVEWMGGQADYRCALPERKDRTLRQSGELQPDCVLVAEGAHLVGIITEGDIVRLTALGKDLAAVRAGEVMLGGVVTLVQDGRQDILGALDLMRRHNVRHLPVLDDGGRVTGLLSAGGIRRTLQPIHLLTLRSVAEVMTTPVVHAPAGSLLVNLARLMAGRRVSCVVIAEPHTDGVHVRPVGLITESDIVQFRYLQFDLTQTRAAAVMSAVASPLKPFESVLVAHQQMLRRRVRRLVVTGERGELVGIVTQTGLLRLLDPLEIFGVIEALQRSVHQLEAEKMELLQGRTLQLERLVEERTAQVQEQARREQLARAAAESARQEAEEANRIKDEFLATLSHELRTPLNPIIGFTQLLRKGQLDEASAARALETIERNARAQSRIIEDMLDLSRIITGKLRLEVRPVALATVVEDALDTVRFAAQSKNIELRARLDPNVVLPFGDSNRLRQVVWNLLSNAIKFTPENGSIEVQLERGRAEAVLTVRDSGVGIAGDFLPHVFERFRQANSTTTRSHGGLGLGLAIVRQLVELHGGTVGVESPGSDQGATFTVRLPLLLGRGARTSATQAPLPPEAMGLQVITVETGCLLDGHTLAETDLRRRYGVVVHALRREGRLIGFPDADTPLREGDQLLVSGGCDQLERLKQRMAESQG

SEQ ID NO: 8421 - protein, 249 aa, Zea mays
LQGLGAMGRGRVELKRIENKINRQVTFAKRRNGLLKKAYELSVLCDAEVALIIFSNRGKLYEFCSGQSITKTLERYEKNSYGGPDTAVQNKENELVQSSRNEYLKLKARVDNLQRTQRNLLGEDLGSLGVKELEQLEKQLDSSLRHIRSTRTQHMLDQLTDLQRREQMLCEANKCLRRKLEETSNQVHGQVWEHGANLLGYERHSPQQQAPSHVGNGLFFHPLEAAAEPTLQIGFAPEHMNNFMPTWLP

SEQ ID NO: 8422 - protein, 324 aa, Arabidopsis thaliana
MQTISKASSATSFFRCSRKLSSQPCVRQLNIRKSLVCRVMKLVSSPLRTLRGAGKSIRVSKFCSVSNVSSLQIELVPCLKDNYAYILHDEDTGTVGVVDPSEAEPIIDSLKRSGRNLTYILNTHHHYDHTGGNLELKDRYGAKVIGSAMDKDRIPGIDMALKDGDKWMFAGHEVHVMDTPGHTKGHISLYFPGSRAIFTGDTMFSLSCGKLFEGTPKQMLASLQKITSLPDDTSIYCGHEYTLSNSKFALSLEPNNEVLQSYAAHVAELRSKKLPTIPTTVKMEKACNPFLRSSNTDIRRALRIPEAADEAEALGIIRKAKDDF

SEQ ID NO: 8423 - protein, 612 aa, Streptomyces rimosus
MCGIAGWIDFERNLAQERATAWAMTDTMACRGPDDAGLWTGGHAALGHRRLAVIDPAHGRQPMHSTLPDGTSHVITFSGEIYNFRELRVELESQGHRFRTHCDTEVVLHGYTRWGRELVDRLNGMYAFAVWDEARQELLLVRDRMGVKPLYYHPTATGVLFGSEPKAVLAHPSLRRRVTAEGLCEVLDMVKTPGRTVFSGMREVLPGEMVTVGRSGVARRRYWTLQAREHTDDLETTIATVRGLLTDRVRRQLVSDVPLCTLLSGGLDSSAVTALAARAGDGPVRTFSVDFSGAGTRFQPDAVRGNTDAPYVQEMVRHVAADHTEVVLDSADLAAPEVRAAVLGATDLPPAFWGDMWPSLYLFFRQVRQHCTVALSGEAADELFGGYRWFHRTAAIDAGTFPWLTAGSARYFGGRGLFDRKLLDKLDLPGYQRDRYAEARKEVPVLPGEDAREAELRRVTYLNLTRFVQTLLDRKDRMSMATGLEVRVPFCDHRLVDYVFNVPWAMKSFDGREKSLLRAAVRDLLPESVVTRVKTPYPATQDPVYERLLRDELAALLADSQAPVRELLDLGRARDLLRRPVGAVSQPYDRGSLELVLWMNTWLAEYGVSLEL

SEQ ID NO: 8424 - protein, 221 aa, Arabidopsis thaliana
MAQQSLIYSFVARGTVILVEFTDFKGNFTSIAAQCLQKLPSSNNKFTYNCDGHTFNYLVENGFTYCVVAVDSAGRQIPMAFLERVKEDFNKRYGGGKAATAQANSLNKEFGSKLKEHMQYCMDHPDEISKLAKVKAQVSEVKGVMMENIEKVLDRGEKIELLVDKTENLRSQAQDFRTQGTQMRRKMWFQNMKIKLIVLAIIIALILIIILSICGGFNCGK

SEQ ID NO: 8425 - protein, 283 aa, Pediococcus pentosaceus ATCC 25745
MNNLTDTYTLNNGVKIPVVGFGTWQSKDGDEAYNAVKAALEAGYRHIDTAAAYGNEESVGKAIKDSGIDRKELFITSKLWNRDHGYESAKKALDTSLAKLGTDYLDLYLIHWPNPVQFRDEWQQRNADSWRAMEEALDAGKVRAIGVSNFRAHHLDELLKTAKVTPAVNQIFLNPSDTEDEVVAYNKEHGILSEAYSPLGTGKIFTIPELKDIAAKYNKSVAQVVLRWSLQHGFLPLPKSVHADRIKQNTEIFDFELSDDDIKKIDGFHGVAGLAQDPDATDF

SEQ ID NO: 8426 - protein, 501 aa, Zea mays
  misc_feature (109)..(109): Xaa can be any naturally occurring amino acid
ENPPHRRGGPGGRAGMAYAARRKKRLGRYEVGRTIGQGTFAKVKFAVDSDTGAPVAMNVLDKETIFAHRMLHLIKREISHNRPSRRRRWSTTRSSSCRTPKANARSAGXKIKREISIMKIVRHPNIVRLNEVLAGRTKIYIVLELVTGGELFDRIVRHGKLRENEARKYFQQLIDAIDYCHSKGVYHRDLKPQNLLLDSRGNLKLSDFGLSTLSQNGVGLVHTTCGTPNYVAPEVLSSNGYDGSAADIWSCGVILYVLMAGYLPFEENDLPHLYEKITAAQYSCPYWFSPGAKSLIQRILDPNPRTRITIEEIREDPWFKKNYVTIRCGEDENVSLDDVQAIFDNIEDKYVSDEVTHKDGGPLMMNAFEMIALSQGLDLSALFDRQQEFVKRQTRFVSRKPAKTVVATIEVVAESMGLKVHSRNYKVRLEGPASNRASQFAVVLEVFEVAPSLFMVDVRKVAGDTPEYHRFYENLCSKLCSIIWRPTEVSAKSTPLRTTTC

SEQ ID NO: 8427 - protein, 532 aa, Bacillus licheniformis ATCC 14580
MDQHSNEQKSDMETDDTLTNRQGHPITNNQNIRTVGNRGPSTLENYDFLEKISHFDRERVPERVVHARGAGAHGYFEAYGTAGDEPVSKYTRAKLFQEKGKRTPVFVRFSTVTHGISSPETLRDPRGFAVKFYTEDGNWDLVGNNLKIFFIRDAVKFPDLIHAFKPDPVTNLQDGERIFDFISNTPEAMHMITFLFSPWGIPANYRQMQGSGVNTYKWVNQEGEAVLVKYHWEPKQGIKNLTQKEAEEIQAKNFNHATQDLYEAIERGDYPEWELFVQIMSDDEHPELDFDPLDDTKLWPEDQFPWLPVGKMVLNKNPEDYFTEVEQAAFGTGVLVDGLDFSDDKMLQGRTFSYSDTQRYRVGANYLQLPINAPKKRVATNQRGGQMQYKVDLGKNQSPHINYEPSTINGLKEAKQDGKEYTPHVEGNLVRESIDRQNNFKQAGDTYRHFEDWEKDELITNLVNTLAPCDQRIQTKMIDMLKQCDKEYGSRVEEGLKNASSQNTSSREPIGAEGAEDAPRQAEEKGHSQDPY

SEQ ID NO: 8428 - protein, 274 aa, Listeria monocytogenes str. 4b F2365
MNLKYTVKLANGVEMPRLGFGVWKVQDGDEAVNSVKWAIEAGYISIDTAAAYKNEEGVGQAIKESGVKREDLFVTTKLWNAEQGYESTLAAFDESLRKLELDYVDLYLIHWPVKGKFKDTWRAFEKLYKDKRVRAIGVCNFHEHHLKELMEDAEIAPMVNQIELHPQLTQEPLRKFCAENNIVVEAWSPLGNGKLLSNPEIKAIADAHGKSVAQVILRWDLQIGVVTIPKSVHQERIIQNADIFDFELSEEEVAKISGLNKDERTGPDPDNFNF

SEQ ID NO: 8429 - protein, 154 aa, Streptococcus thermophilus
MLNKIQQRNSDIYSMTPFNFFEDFRRNLFNDFFEDFSHNLFNDLKSNLIKTDIHETDNEYVVEAELPGIPKEDIQVNYENGVLTISGQRQIDAAIEDKKGKLIHSERSLTSVRRQYLLENVKEDEIKASYSDGILKVTLPKDSNKEIKTSIPIE

SEQ ID NO: 8430 - protein, 695 aa, Haemophilus influenzae R2866
MVMKFKMSKNVICYAWLSVCLSSAIPAFAVQPTLKPSDISIPAISEESQLATKRATTRLTQSHYRKIKLDDDFSEKIFDRYIKNLDFSHNTFLQSDIDELRQKYGTKLDEQLNQGDLSAAFDIYDVMMKRRYERYTYALSLLDKEPDLNGQDQIEIDREKAAAPQTEADANKLWDARVKNDIINLKLKDKKWSEIKAKLTKRYNLAIRRLTQTKADDIVQIYLNAFAREIDPHTSYLSPRTAKSFNESINLSLEGIGTTLQLEDDEISIKSLVPGAPAERSKKLHPGDKIIGVGQATGDIEDVVGWRLEDLVEKIKGKKGTKVRLEIEPAKGGKSRIITLVRDKVRIEDQAAKLTFEKVSGKNIAVIKIPSFYIGLTEDVKKLLVKLENQKAEALIVDLRENGGGALTEAVALSGLFIADGPVVQVRDAYQRIRVHEDDDATQQYKGLLFVMINRYSASASEIFAAAMQDYRRGIIIGQNTFGKGTVQQSRSLNFIYDLDQSPLGVLQYTIQKFYRVNGGSTQLKGVAADINFPEIIDAKEYGEDKEDNALAWDKIPSASYMEVGNIDYIDNAVNILNEKHLARIAKDPEFVALNEELKVRNERRDRKFLSLNYKMRKAENDKDDARRLKDLNERFKREGKKALKDIDDLPKDYEAPDFFLKEAEKIAADFVIFNSDQKINQANGLSEAKTESKK

SEQ ID NO: 8431 - protein, 221 aa, Glycine max
MGQQSLIYSFVARGTVILAEYTEFTGNFTSVAAQCLQKLPSSNNKFTYNCDGHTFNYLVDNGFTYCVVAVESAGRQIPIAFLERIKEDFTKKYAGGKAATAAAHSLNREFGPKLKEEMQYCVDHPEEISKLAKVKAQVSEVKGVMMENIEKVLDRGEKIELLVDKTENLRSQAQDFRQQGTKIRRKMWFQNMKIKLIVLGIIIALILIIVLSVCGGFNCGK

SEQ ID NO: 8432 - protein, 365 aa, Rhodospirillum rubrum
MSSPFPHLFDPLALGDLHLPNRIVLAPLTRSRALPGEVAGALTARYYAQRASGGLLISEGTQISPSGRGYPRTPGIHSPEQIAGWKGVTEAVHAAGGRIFAQLWHVGRISHRSLQPGGVLPVAPSAIRPKTKIFTESGLVALETPRALDTAEMADIVASFRAAAENARAAGFDGVEIHAANGYLLDQFLRDGTNHRDDAYGGSIDNRLRLVLEVVEAVLGVWDKARVGLRLSPANPFNDILDSTPQATFEAVVSALDGFGLGYLHMVEGSLGSGEGAPEIDFAALRRLWQGVYMANGGYDGPRAEAALASGHAQLVSFGTAYLANPDLPERLRTNAPLNTPDSTTFYQGEDKGYVDYPTLADGAA

SEQ ID NO: 8433 - protein, 587 aa, Glycine max
  misc_feature (121)..(121): Xaa can be any naturally occurring amino acid
MYRFATSLASKARIARSSTQQIGSRVSWNRNYAAKDIKFGVEARALMLKGVEELADAVKVTMGPKGRNVVIEQSFGAPKVTKDGVTVAKSIEFKDKVKNVGASLVKQVANATNDVAGDEYXGREHFNCLAGTTCATVLTRAIFTEGCKSIAAGMNAMDLRRGISMAVDAVVTNLKSRARMISTSEEIAQVGMISANGEREIGELIAKAMEKVGKEGVITISDGKTLYNELEVVEGMKLDRGYISPYFITNDKNQKCELEDPLIIIHEKKISSINAIVKVLELALKRQRSLLIIAEDVESDALATLILNKLRAGIKVCAIKAPGFGENRKSGLQDLAVLTGGQLITEELGLKLEKVDLDMLGTCKKITVSKDDTVILDGAGDKKALEERCEQIRSAIENSTSDYDKEKLQERLAKLSGGVAVLKIGGASEAEVGEKKDRVTDALNATKAAVEEGIVPGGGVALLYASSELDKLQTANFDQKIGVQIIQNALKTPVHTIASNAGVEGAVVVGKLLEQNDPDLGYDAAKGEYVDMVKAGIIDPLKVIRTALVDAASVSSLMTTTEAVVSELPNDNKDTPAMAGGMGGMGY

SEQ ID NO: 8434 - protein, 196 aa, Zea mays
VLGGVKENPAAANSAESDGLGRFAVDEHNRRENALLEFVRVVEAKEQVVAGTLHHLTLEAVEAGRKKLYEAKVWVKPWLDFKELQEFSHKGDATAFTNADLGAKQGGHEPGWREVPVEDPVVKDAAHHAVKSIQERSNSLFPYELLEILRAHAQVVEDFAKFDILMKLKSLEGAFVLNQHQPAEHDESSSQTDVTV

SEQ ID NO: 8435 - protein, 431 aa, Arabidopsis thaliana
MAEDSNSSESIIVNVTGDDNKSALFGKYDLGKLLGSGAFAKVYQAEDLQNGGESVAIKVVQKKRLKDGLTAHVKREISVMRRLRHPHIVLLSEVLATKTKIYFVMELAKGGELFSRVTSNRFTESLSRKYFRQLISAVRYCHARGVFHRDLKPENLLLDENRDLKVSDFGLSAMKEQIHPDGMLHTLCGTPAYVAPELLLKKGYDGSKADIWSCGVVLFLLNAGYLPFRDPNIMGLYRKIHKAQYKLPDWTSSDLRKLLRRLLEPNPELRITVEEILKDPWFNHGVDPSEIIGIQADDYDLEENGKILNAFDLISSASSSNLSGLFGNFVTPDHCDQFVSDESTAVIMRKVEEVAKQLNLRIAKKKERAIKLEGPHGVANVVVKVRRLTNELVMVEMKNKQRDVGLVWADALRQKLRRLINQPVYKVPDKP

SEQ ID NO: 8436 - protein, 546 aa, Cryptococcus neoformans var. neoformans B-3501A
MPVFSTLINSTESYQRRFDQMARAVLVYWVLKYVLLDGFRHIKARGLCGTANEIRNKIKSLVVRIMLAFPSNRAKLNSELAKTRAELKEKLAPSQYPDGVRLTTVRTLPETGRGREWLESEWENLKKLEKADVDNGRVSGAVYHGGDELNAVINEAMAKFVVTNPLHPDVFPGVRKMESEIVSMCLNLFNGPNGAGTTTSGGTESILMSVKTHRDWARVTKGITRPEMVIPSSAHAAFWKASEYFNIKLHVIPVNQKTRKAEVTAMKRAINPNTIMIVGSAPNFPDGAIDPIPELGALAKRRNVGLHVDCCLGSFIMPFLEKAGFSEGIDPFDFRVPGVTSISCDTHKYAFCPKGTSVIMYRSSELRRFQYYVITDWAGGVYASPSMAGSRPGSVLAGAWAVLNHIGADGYTSSCRQIISAARYLTSSLRTLFPDDLYVLGDPKGPVVAFNSKTINIYAVGDVMSKKGWHLSALGGDGGLHMAFTRLSAKSVDKLIEDLGDALKEVKASPQGAGGDMVALYGLGQTSAGPHVVGKLAETFLDTLYE

SEQ ID NO: 8437 - protein, 201 aa, Clostridium tetani E88
MELKRIPVGMYQANCYILMDKKSKEGIIVDPGDEANLILQTVNKMDCKVKYILLTHGHVDHVSAVKEVKDSLKAPVGINEKDEESILKGMDLFGNSQTCGAADIKIKEGDTFKIGDKEIKCIETPGHSLGGMCFLIENIIFTGDTLFEGSIGRTDFYGGNFEILIKNIKEKILTIPEDTLVLPGHGMETTVGKEKISNPFL

SEQ ID NO: 8438 - protein, 485 aa, Bacillus licheniformis ATCC 14580
MTTNKNNLTTSWGAPVGDNQNSMTAGSRGPTLIQDVHLLEKLAHFNRERVPERVVHAKGAGAHGYFEVTNDVSKYTKAKFLSEVGKRTPLFVRFSTVAGENGSADSVRDPRGFAVKFYTEEGNYDLVGNNTPVFFIRDAIKFPDFIHTQKRHPVTHLKNPDAVWDFWSLSPESLHQVTILMSDRGIPATYRHMHGFGSHTFKWVNAEGEGVWIKYHFKTEQGIKNLTEEVGTKIAGENPDYHTQDLYEAIEKGDFPAWKLYVQIMPLEDADTYRFDPFDVTKVWSQKDYPLIEVGRMVLNRNPENYFAEVEQATFSPGTLVPGIEPSPDKMLQGRLFAYADAHRYRVGANHNSLPINRPKAEVHNYQRDGQMRFDSNGGGSVYYEPNSFGGPQETPENKTTAYPVSGSADSTAYDHNDHYTQAGDLYRLLSEEERTRLVSNIVGSMKQVTKDEIKLRQIQHFYKADPEYGTRVAEGLGLSVPQEV

SEQ ID NO: 8439 - protein, 918 aa, Salmonella enterica subsp. enterica serovar Typhi Ty2
MTNYSLRARMMILILAPTVLIGLLLSIFFVVHRYNDLQRQLEDAGASIIEPLAVSSEYGMNLQNRESIGQLISVLHRRHSDIVRAISVYDDHNRLFVTSNFHLDPSQMQLPAGAPFPRRLSVDRHGDIMILRTPIISESYSPDESAIADAKNTKNMLGYVALELDLKSVRLQQYKEIFISSVMMLFCIGIALIFGWRLMRDVTGPIRNMVNTVDRIRRGQLDSRVEGFMLGELDMLKNGINSMAMSLAAYHEEMQHNIDQATSDLRETLEQMEIQNVELDLAKKRAQEAARIKSEFLANMSHELRTPLNGVIGFTRLTLKTELNPTQRDHLNTIERSANNLLAIINDVLDFSKLEAGKLILESIPFPLRNTLDEVVTLLAHSSHDKGLELTLNIKNDVPENVIGDPLRLQQVITNLVGNAIKFTESGNIDILVEKRALSNTKVQIEVQIRDTGIGIPERDQSRLFQAFRQADASISRRHGGTGLGLVITQKLVNEMGGDISFHSQPNRGSTFWFHINLDLNPNVIIDGPSTACLAGKRLAYIEPNATAAQCTLDLLSDTPVEVIYSPTFSALPLAHYDIMILSVPVTFREPLTMQHERLAKAASMTDFLLLALPCHAQINAEKLKQGGAAACLLKPLTSTRLLPALTEYCQLNHHPEPLLMDTSKITMTVMAVDDNPANLKLIGALLEDKVQHVELCDSGHQAVDRAKQMQFDLILMDIQMPDMDGIRACELIHQLPHQQQTPVIAVTAHAMAGQKEKLLSAGMNDYLAKPIEEEKLHNLLLRYKPGANVAARLMAPEPAEFIFNPNATLDWQLALRQAAGKPDLARDMLQMLIDFLPEVRNKIEEQLVGENPNGLVDLVHKLHGSCGYSGVPRMKNLCQLIEQQLRSGVHEEELEPEFLELLDEMDNVAREAKKILG

SEQ ID NO: 8440 - protein, 666 aa, Photobacterium profundum SS9
MNCRFRFSLIAAGMMLAASAQALEAKYSLSDLPQLAPEKQHATASKRVASRFTRSHYKQFSLNDQFSSDMFDRYVEMLDFNKSFLTAADVRLLEKWQNKFDDQLKVGDTSGAFEIFNKVLQRRYDRYQYALTLLDNEIKFNTNDDFVVDRSELDWAADRNALNEIWRQRVKYDALNLKLADKDWKEIKETLSKRYNNALKRLTQTHSEDVFQIYMNAFAREVDPHTSYLSPRNAEQFQSEMNLSLEGIGAVLQVVDDYTVIRSLVAGGPASSSKKLAAGDRIIGVAQDGKSVVDVIGWRLDDVVQLIKGPKGSKVKLEILPEGKNAKSYDITIVRDKIRLEDRAVKSEVKTVGSKKIGVIEVPSFYVGLAEDTKKEIAKLNESQVDGVVIDLRNNGGGALTEATALTGLFINSGPVVQVRDSYGRVKVNGDSDDRVYFDGPLTVLQNRYSASASEIFAAATQDYGRAVVIGEQSFGKGTVQQHRSLNHIYDLFDKPLGHVQYTIQKFYRINGGSTQNLGVVPDIAFPTAVDPAETGESVEDNALPWDSIKPASYQKLVNYSPILPSLKAKHEQRISKDMEFGFIRDDIQEYKKDKDIKTISLNEKMRIAEQDKTDSKRLARLNKRQKVLGKKPFATLEDVPKDYESPDAYLDEAVDITADLVNAQS

SEQ ID NO: 8441 - protein, 437 aa, Glycine max
MEPPSQQKSPQPPPRTATILGKYQLTRFLGRGSFAKVYQGRSLVDGSAVAVKIIDKSKTVDAGMEPRIIREIDAMRRLHHHPNILKIHEVLATKTKIHLVVELAAGGELFAKISRRGKLPESTARRYFQQLVSALRFCHRNGVAHRDLKPQNLLLDGDGNLKVSDFGLSALPEQLKNGLLHTACGTPAYTAPEILRRSGGYDGSKADAWSCGLILFVFLAGHLPFDDTNIPAMCKKISRRDYQFPEWISKPARFVIHKLLDPNPETRISLESLFGNAWFKKSLNPETAEENALGLSYVKSSYNYEGSKKSSGVTAFDIISMSSGLDLTRLFETTSDLGSKREKRFSSSARVEVVEEKVKEVGGVLGFKIEVGKSNGAIALVKGKVALVFEVLEIVPHELLFVAVKVVEGALEFEEHHWGDWKDALQDLVLSWHNQES

SEQ ID NO: 8442 - protein, 270 aa, Secale cereale
ERIPERVVHARGASAKGFFEVPHDVSQLTCADFLGAPGVQTPVIVRFSTVVHDRGSPETLRDPRGFAVKFYTREGNFDLVGNNMPVFFIRDGMKFPDMVHAFKPSPKTNMQENWRIVDFSSHHPESLHMFTFLFDDVRIPLNYRHMDGFGVNTYTFISSDGKAHLVKFHWKPTCGVKCLLDDDAVTVGGTCHTHATKDLTDSIAAGNYPVWKVFIQTVDADHEDKFDFDPLDVTKTWPEDIIQLQPVGRMVLNKNIDNFFAENEQLAFCS

SEQ ID NO: 8443 - protein, 237 aa, Arabidopsis thaliana
  misc_feature (117)..(117): Xaa can be any naturally occurring amino acid
TTACGTPDFDKMMGNLICKQMPWNDEHAMFAAWMDCKTEDPWIDAIMVLLLKFGLMHHLALHCVACFLTRGDLFIHWEQGRDVFERLLIDSDWAINNGNWMWLSCSSFFYQELSPFXFNRIYSPISFGKKYDPDGKYIRHFLPVLKDMPKQYIYEPWTAPLSVQTKANCIVGKDYPKPMVLHDSASKECKRKMGEAYALNKKMDGKVDEENLRDLRRKLQKDEHEESKIRNQRPTLK

SEQ ID NO: 8444 - protein, 358 aa, Polaromonas sp. JS666
MSRLFSKTTLGSLPLQNHLLMSPLTRNRATGNIPNALMAQYYAQRATAGLIISEGTSPSPNGLGYPRIPGIFSAEQIAGWKQITDAVHAQGGKMFMQLMHCGRIAHPLNLPQGARVLGPSAVAAAGDMYTDAEGLKPNALPQAMTEADIKTAIEEFAQGAKNAVAAGFDGVELHGANGYLLEQFIRPNSNQRTDGYGGAIENRARFVLEVADAVIEAIGKDKVGIRLSPFGVFNDMPLYDAMQADYTWLAQQLNARGVVYIHLVDHSAMGAPTVPDAMKAAFRQLFKGTLVLSGGYDAACAEGDLVAGKADLVAVGRPFLANPDLIARWQAGAAVNAPDMSTFYTPGPEGYTDYPTLA

SEQ ID NO: 8445 - protein, 497 aa, Ustilago maydis 521
MFKSFGKIMGGSSRKGKSKLQDGDDSVDASNGLPGSDSSNLLRAKSKDSLAVTENGSGNFANNGSSAPAKIEKRGGVSRHESPLPSPSPSARNVLEGQEESSEVGSSAVARSAPASDVGGPRPANDAASQSTSVPTANTILSNPLAQSGSTGFPSSVGKNAQAAAGGDQVRTFDIDDMISRLLEAGYSGKIPKPALKNAEITAVCQAAREIFLSQPTLIELSPPVKIVGDTHGQYHDLLRLFEMCGFPPSANYLFLGDYVDRGKQSLETILLLLCYKIKYPENFFLLRGNHECANVTRVYGFYDECKRRVNIKIWKTFIDVFNTLPIAAVVASKIFCVHGGLSPSLSNMDDIRRIERPTDVPDYGLLNDLLWSDPSDTALDWEDNERGVSYCFGKAVIQQFLAQYDFDLICRAHMVVEDGYEFWNERTLVTIFSAPNYCGEFDNFGAVMSVSEDLLCAFELLKPLDGAALKKEMAKNKRRSLLQHQSPPARGSQQSY

SEQ ID NO: 8446 - protein, 485 aa, Glycine max
MLREKRESALKMGKFSSSYSTSDFVHFGVLLPFLLLSQLFFQLAWCGSIVKFLPGLEGPLPFVLETGYVGVGESEDVQAFYYFIESENNPKEDPLMLWLTGGPGCSAFSGLVIEIGPIAFKNEEYNGSLPNLVLRPHSWTKVSSIIFVDLPVSTGFTYATTEFATQRSDWIQVHQVHQFLRKWLIEHPNFLSTDVYIGGDSYSGITIPAIVQEISLGNEKGLQPWINLQGYLLGNPATTRRHENYRISFAHGMGLISDELYRSLQKNCKGEYINVDTKNVLCSRNIETFNEVTSGLSMVNILDPSCDWLDTETSWRRSLLKKYPRKNFLNTHLKLPSLNCRSYAYFLCGYWANDDSVRSALHIRKGTIGKWRRCTFNIPNKEDISSSYEYHVNLSRKGYRSLIYSGDHDMKIPFLETQAWISSLNYSIVDDWRQWHTDGQVAGYTRTYSNRMTFATVKGGGHTAPEYKPEECLAMFRRWISNKAL

SEQ ID NO: 8447 - protein, 224 aa, Aristida purpurea var. longiseta
IENKISRQVTFAKRRNGLLKKAYELSLLCDAEVALIIFSGRGRLFEFSSSSCMYKTLERYRSCNYNPQEAKAPQESEINYQEYLKLKTRVEFLQTTQRNILGEDLGPLSMKELVQLENQIEISLKQIRSRKNQMLLDQHYDLKNKEQKLQDLNKDLRKKLQETSGENALHISWEEGGHSGASGNAIEPNQGFLQHPENDSSLQIGYHQQAYMDQLSNEDMGAHH

SEQ ID NO: 8448 - protein, 547 aa, Pseudomonas aeruginosa
MAAKEVKFGDSARKKMLVGVNVLADAVKATLGPKGRNVVLDKSFGAPTITKDGVSVAKEIELKDKFENMGAQLVKDVASRPTDAAGDGTTTATVLAQAIVNEGLKAVAAGMNPMDLKRGIDKATVAIVAQLKELAKPCADTKAIAQVGTISANSDESIGQIIAEAMEKVGKEGVITVEEGSGLENELSVVEGMQFDRGYLSPYFVNKPDTMAAELDSPLLLLVDKKISNIREMLPVLEAVAKAGRPLLIVAEDVEGEALATLVVNNMRGIVKVAAVKAPGFGDRRKAMLQDIAILTGGTVISEEVGLSLEGATLEHLGNAKRVVINKENTTIIDGAGVQADIEARVLQIRKQIEETTSDYDREKLQERLAKLAGGVAVIKVGAATEVEMKEKKAPVEDALHATRAAVEEGVVPGGGVALVRALQAIEGLKGDNEEQNVGIALLRRAVESPVRQIVANAGDEPSVVVDKVKQGSGNYGFNAATGVYGDMIEMGILDPAKVTRSALQAAASIGGLMITTEAMVAEIVEDKPAMGGMPDMGGMGGMGGMM

SEQ ID NO: 8449 - protein, 925 aa, Pseudomonas fluorescens PfO-1
MRWLRIAIGFTVTLLTLLCMLPAQAAQGSGWSVLLDDQGNLQLSDIRSARYTNQFSPIELDRLTAAEPDGALWLRFRLAPGKHEQVLRIFAPDLSHLNLYVLDGDRLIEQRDTGTAQPQAERPLPSSDFMLPLPQSDKPLDVYLRLVSDHQLRPYITLQAAVMAAANHNQTLIYGLLFGCLAMLILHNLIRYAYTRSRSSLWLAVCEGLLSLSLLLLLNLAGPWLPNWHAIQTPGAYLALLLTAPAGLMFAYRFFAPLGPHPLNKLLIGDILFIVICSLLLLFVNTLPLNIITYALVALAGLSMLLVGFYHWQKGYRPARLFVAAMVVFNIGTLIILPALLGLTLVAPQGLIMTLMGFICISGLLMSIALGERQRSITESRFSISRDLAASNAEINAKAEFLAKISHEIRTPMNGVLGMTELLLGTPLSVKQRDYVQTIHSAGNELLTLINEILDISRLESGQIELDDVQFDLNALIDDCLSIYRAKAEQQNVELISFIQPQVPRVISGDPTRLRQTLLSLLENALKKTEEGEVLVVVALDERSAGPRLRIAVQDSGQPMDQEERDALMHAELHSKHFLSANRLGGNLGLVIARQLIRLMQGEFGIKSGASQGSTLWLTLPLDPDRLEHPTSDLDSPLQGARVLVVDDNDTCRKVLVQQCSAWGLNVSAVPSGKEALALLRTKAHLRDYFDVVLLDQNMPGMTGMQLAAKIKEDPSLNHDILLIMLTGISNAPSKIIARNSGIKRILAKPVAGYTLKTTLADELNQRNRGQVVFQPQVASPAAPVKVPSDFRILVAEDNTISTKVIRGMLGKLNLQPDTASNGEEALQAMKAQRYDLVLMDCEMPILDGFSATQQLRAWEVGNQRIRTPIVALTAHILAEHKERARQAGMDGHMAKPVELSQLRELIEHWVAQRDQQNRATTQPS

SEQ ID NO: 8450 - protein, 272 aa, Nostoc sp. PCC 7120
MTIATSTKPQINWVNTLFFLGLHIGALFAFIPSNFSWAAVGVALLLYWITGGLGITLGFHRLVTHRSFQTPKWLEYFLVLCGTLACQGGPIEWVGTHRIHHLHSDTDPDPHDSNKGFWWSHIGWLIYHSPSHADVPRFTKDIAEDPVYQFLQKYFIFIQIALGLLLLYLGGWSFVVWGVFFRIVWVYHCTWLVNSATHKFGYRTYDAGDRSTNCWWVAVLVFGEGWHNNHHAFQYSARHGLEWWEVDLTWMTVQLLQILGLATNVKLADKKQ

SEQ ID NO: 8451 - protein, 197 aa, Solanum tuberosum
MRVISKLTLLIISIGCIFQVSSLGADASSLLPLILDQMIGSNPANTFLDPFKVLEQIPFGLENREETTLPLSIARVDWKETAEGHVISIDVPGLKKDDIKIEIEENRVLRVSGERKKEEEKNDEQNHWHCVERSYGKFWRQFRLPENADIDTMKAKLENGVLTISFAKLSADRIKGPKVVSIESKQEGKESSVREEL

SEQ ID NO: 8452 - protein, 449 aa, Oryza sativa
MYRAKRAALSPKVKRRVGKYELGRTIGEGTFAKVRFAKNTENDEPVAIKILDKEKVQKHRLVEQIRREICTMKLVKHPNVVRLFEVMGSKARIFIVLEYVTGGELFEIIATNGRLKEEEARKYFQQLINAVDYCHSRGVYHRDLKLENLLLDASGNLKVSDFGLSALTEQVKADGLLHTTCGTPNYVAPEVIEDRGYDGAAADIWSCGVILYVLLAGFLPFEDDNIIALYKKISEAQFTCPSWFSTGAKKLITRILDPNPTTRITISQILEDPWFKKGYKPPVFDEKYETSFDDVDAAFGDSEDRHVKEETEDQPTSMNAFELISLNQALNLDNLFEAKKEYKRETRFTSQCPPKEIITKIEEAAKPLGFDIQKKNYKMRMENLKAGRKGNLNVATEVFQVAPSLHVVELKKAKGDTLEFQKFYRTLSTQLKDVVWKCDGEVEGNGAAA

SEQ ID NO: 8453 - protein, 712 aa, Dechloromonas aromatica RCB
MTRRPRQAMDGLSSPLWRTTLLKQLCWIVLGLTVSAQAAELAPQPQHQRVVRISAALLGHYHYKPAVLDDALSEAIFERYLKTLDSEKYYFTQSDIDQLSEYRTRLDDAIIEENLQAPFAIFNLYARRAEEHFSYARSLLKGGFRFDQNDRFTFVRDKAEWASSDEALREIWQQRVKNDWLRLKLAGKSDPEIVTALDKRYEQSIRRINRLKSDDAFQMFMNAYTTAIEPHTTYLGPRASADFDISMRLSLTGIGAVLQERNDYTMVREVTPGGPAARSGQLKAGDRIVAVAQGEKGAFVDVVGARLDDTVALIRGAADSVVRLDILPANAGPDAKHRQITLVRKKVDLAQQAAKKAVLDVTDNGSARRIGVITLPAFYDDFEGRRKGDPNFRSATRDVAKLLKELGKEKVDGVVLDLRHNGGGSLKEAIELTGLFIDTGPVVMERNAQGQVFVDGDTTPGTAWDGPLGVLIDGESASASEIFAAAIQDYGRGIVIGEQSYGKGTVQTVLNLDQAVGSEKPALGELRMTIAQFFRINGSTTQVRGVQPDIALPAANDPTLTGEASNDNALPWTHIRAAAYDRVADKGEVIPALLARHVARAANDPEFQRLEETASELQRLRLQTSVSLNEAERRRENESLEKRLSGLARADDGLLDSEREPDTDGKDEKAGNKAKDTRLLAAARIIADEVDLQREKGKPGALERPNQAAINR

SEQ ID NO: 8454 - protein, 116 aa, Pinus pinaster
TVFTVILYGSPLSVIRLVIHTKSVEFMPSFYFSLFAFLGSVLWMVYGALSGDILIMAPNFVGIPLGLSQMALYCIYWNNSPVRVEATKLEAGGELKSIEQNIKEDIELYTEDIEKA

SEQ ID NO: 8455 - protein, 649 aa, Lactobacillus johnsonii NCC 533
MCGICAFFDPELKDKDCAIQGMMDTIKHRGPSSDGKYTNDKVALGFRRLSIIDLRGGSQPIFNEDKSRAIIFNGEIYNFKPLRKELIDAGHTFTTKADTEVLLHGYEEWGMDGLLKKVRGMFAFVIWDDNTKTLYGARDFFGIKPMYYSDQNGKLIVGSELKSFLAYPGFKKELNTEAVKPYLMNQYNDLKETFFKGVYRFPAGHWFEYKDGKMKTHQYWDAKYVENSLSFEETLDKINEDLKETVDLYRNADVPVGAFLSEGIDSSYLTSLLDPEDVFSVSFDDSTYNEASKAKALSDLHGWKFFADKVDADEAMRDFPEMQYHMDEPDANPSIIPLWYLCKLARKHVTVALSGEGADELFAGYVNYGMHTHNDVIKVFTAGLKKLPKKSRVRLAHKIKKMPNFPGKVHMYTNLAEPSEFYVGQSVIYDMDYPTIFTSKDANGILRDKYKNDLTVNGIYQEDFKKVKNIDEVKQMQYIDLHHFMLNDIEQKADKISMAHSLELRVPYLDKKIAELANSIPTKYLVNRHDTKYALRKASEKVLPEEWAQRPKLGFPTPIKQWLKEPRFYKQVRALFTEDFVDDIFDQKKIVKLLDDNYKGDGSARRQIWAIYTFLVWYKLFFVDYDETVKKYQHVQPEVAELIESGRLV

SEQ ID NO: 8456 - protein, 137 aa, Brassica napus
  misc_feature (100)..(100): Xaa can be any naturally occurring amino acid
MTTISLRKQNTRLPPEVNRVLYVRNLPFNITSEEMYDIFGKYGAIRQIRIGCHKDTKGTAFVVYEDIYDAQNAVDHLSGFNVANRDTSRLPYLRVQRREXYLIVLYYQHAKMSKKFDQKKSEEEVAKLQEKYGVSVF

SEQ ID NO: 8457 - protein, 245 aa, Pinus radiata
MGRGKVELKRIENKINRQVTFAKRRNGLLKKAYELSVLCDAEVALIIFSNRGKLYEFCSSSSMMKTIEKYQKCSYGSLETNCSINEMQNSYQDYLELKARVEVLQRSQRNLLGEELGPLNSKELEQLEHQLENSLKQIRSAKTQFMFDQLAHLQHKEQMLVEANRELRKKLEESNTRIPLRLGWEAEDHNNISYRRLPTQSQGLIFQPLGGYPNMQIGYNPAGSNELNVSPADQHPNGFIPGWML

SEQ ID NO: 8458 - protein, 187 aa, Nicotiana tabacum
ITSMLYVHHGINMGFTGNYHEYFSEATDVDAVVYLMLANNLIHKIFPDATVIAEDVSGMPGLSRPVSEGGIGFDYRLAMAVPDKWIDYLKNKNGEDWSMKEVTRSLTNRRYTEKCIAYAESHDQSIVGDKTIAFLLMDKEMYSGMSCLTDTSPVVDRGIALHKMIHFFTMALGGEGYLNFMDNEFGH

SEQ ID NO: 8459 - protein, 766 aa, Bdellovibrio bacteriovorus HD100
MKKKLTFVHLFLLNQLVTTLVLLTVLGVYGTHLFIQEQRAIRERMEPASAREVDRINNDFATLEANVQRLKSMVELFDVMPKGTRVEKFRQFASATIAGHSTQFNAWVALGPRLAKEYLGRESYVYVVHRDYSLFASPKYNDPTTFVAEVFTEPGYDKDPDVQWWWMNEKSSGVNYSDFYFDKGYMEKVMFSTTTGIFSNAGKLEAVVGIDTLAGDIAHRLGIFKLGDTGGALVVDEHGRPVLPLIAKDTPVLGFKYLRALNQDEFRAMPKLSQKVFNIQNQRQLQEFPGADGKTYLTYSRPIKGKPWHLVIYQEKGEAYSGLYFRLFFFGFVALVAYVVFTLMVWMTGKYVIAQDKEALARLQDSRDRAEAATRAKSLFLSTMSHEIRTPLNAMLGSAELLNETHLNFEQKELLISLQSAGDTLLSMLNNILDFSKFESGRMQLESREFLLSDLVREVQALISTSVLRKNLQFTFHPPEHDRWIVGDSLRLKQVLMNLLGNAVKFTDRGAIELTVQPYPGSEPGKETIFFEVKDTGIGIAKENLKKVFDEFGQEDSSVTRRFGGTGLGLSISQKIVQLMGGELYCESRQFVGSRFHFSVQMTSRRAELWSARFNLELTPPPQLVRPSSEAGRKSILIVDDMEENHTLLKAYIKRLEYVTTDSAYNGYECLEMWERGHYDMIFMDVQMPKMSGLDTIRKLREIERARGLHRTPVVVISANSFTEDIEKSLMAGADQHCGKPVRKQTVLEIVQKYCSEDIETAPANS

SEQ ID NO: 8460 - protein, 464 aa, Glycine max
MEGASWNSSVCVAPFLSKTYDMVDDPSTDLVVSWGENNNSFVVWNVPQFATDILPNHFKHNNFSSFVRQLNAYGFRKVDPDRWEFANEGFLRGEKQLLKSISRRKSAHVNGSQQASQVHKSAAGACVEVGKFGLEEEVERLKRDKNVLMQELVRLRQKQQGTDNQLQNVGQRVQSMEQRQQQMMSFLAKAMQSPGFLAQFVQQQNESSKHIPGSNKKRRLQRQEEDSLATKDLHSSLDGHIVKYQSSINEAAKALFRQILQINNSTTQSSIKNPDVFLIDDIPSAIASDSSSSSTQVSNVMVPPISELTSMEVGSQFPLSCMPSNISEVQSSPAVLGFCRSQGMETESSLLNHELNVMGADTRNMGEIDMMSTVLDEADEADHFSPDTDGISKLPEISDEFWELFLRPSPLTEDTEETKCSSLGCGLTEDQGLPSEMGNKQENFDTIQHVDCLTQQMGLHALEY

SEQ ID NO: 8461 - protein, 389 aa, Chlamydomonas reinhardtii
MAAMMMRQKVAGAIAGERRSAVAPKMGRAATAPVVVASANASAFKGAAVTARVKASTRAARVQSRRTAVLTQAKIGDSLAEFLVEATPDPKLRHVMMSMAEATRTIAHKVRTASCAGTACVNSFGDEQLAVDMVADKLLFEALKYSHVCKLACSEEVPEPVDMGGEGFCVAFDPLDGSSSSDTNFAVGTIFGVWPGDKLTNITGREQVAAGMGIYGPRTVFCIALKDAPGCHEFLLMDDGKWMHVKETTHIGEGKMFAPGNLRATFDNPAYERLINFYLGEKYTLRYTGGIVPDLFQIIVKEKGVFTNLTSPTTKAKLRILFEVAPLALLIEKAGGASSCDGKAVSALDIPILVCDQRTQICYGSIGEVRRFEEYMYGTSPRFSEKVVA

SEQ ID NO: 8462 - protein, 145 aa, Triticum aestivum
  misc_feature (15)..(15): Xaa can be any naturally occurring amino acid
  misc_feature (89)..(89): Xaa can be any naturally occurring amino acid
MASSMISSPAVTTVXNRAGAGMVAPFTGLKSMAGFPTRKTNNDITSIASNGGRVQCMQVWPPVGKKKFETLSYLPDLDDAQLAKEVEYXLRKGWIPCLEFELEHGFVYREHNRSPGYYDGRYWTMWKLPMFGCTDASQVLKELQE

SEQ ID NO: 8463 - protein, 523 aa, Buchnera aphidicola (Uroleucon ambrosiae)
MAAKDVKFGNEARIKMLRGVNVLADAVKVTLGPKGRNVVLDKSFGAPSITKDGVSVAREIELEDKFENMGAQMVKEVASKANDAAGDGTTTATLLAQSIVNEGLKAVAAGMNPMDLKRGIDKAVISAVEELKNLSVPCSDSKAITQVGTISANADEKVGALIAEAMEKVGNDGVITVEEGTGLQNELEVVKGMQFDRGYLSPYFINKPETGIVELENPYILMADKKISNVREMLPILESVAKSGKPLLIISEDLEGEALATLVVNSMRGIVKVAAVKAPGFGDRRKAMLQDISILTGGSVISEELAMELEKSTLEDLGQAKRVVISKDTTTIIGGIGEKHTIQSRISQIRQEIQEATSDYDKEKLNERLAKLSGGVAVLKVGAATEVEMKEKKARVEDALHATRAAVEEGVVAGGGVALVRVAGKISHLSGQNEDQNVGIRVALRAMEAPLRQIVSNSGEEPSVVTNNVKDGKGNYGYNAASDQYGDMIDFGILDPTKVTRSALQYAASVAGLMITTECMVTD

SEQ ID NO: 8464 - protein, 523 aa, Buchnera aphidicola (Uroleucon ambrosiae)
MAAKDVKFGNEARIKMLRGVNVLADAVKVTLGPKGRNVVLDKSFGAPSITKDGVSVAREIELEDKFENMGAQMVKEVASKANDAAGDGTTTATLLAQSIVNEGLKAVAAGMNPMDLKRGIDKAVISAVEELKNLSVPCSDSKAITQVGTISANADEKVGALIAEAMEKVGNDGVITVEEGTGLQNELEVVKGMQFDRGYLSSYFINKPETGIVELENPYILMADKKISNVREMLPILESVAKSGKPLLIISEDLEGEALATLVVNSMRGIVKVAAVKAPGFGDRRKAMLQDISILTGGSVISEELAMELEKSTLEDLGQAKRVVISNDTTTIIGGIGEKHTIQSRISQIRQEIQEATSDYDKEKLNERLAKLSGGVAVLKVGAATEVEMKEKKARVEDALHATRAAVEEGVVAGGGVALVRVAGKISHLRGQNEDQNVGIRVALRAMEAPLRQIVSNSGEEPSVVTNNVKDGKGNYGYNAASDQYGDMIGFGILDPTKVTRSALQYAASVAGLMITTECMVTD

SEQ ID NO: 8465 - protein, 189 aa, Dacrydium franklinii
DEHGEVVAEIRRSDLEPYLGLHYPATDIPQASRFLFMQNRVRMICDCSATPVQVIQSEELRQPLCLVGSTLRAPHGCHAQYMANMGSIASLVMAVVINGNDEEGAGTSGRSSMKLWGLVVCHHTSPRAVPFPLRYACEFLMQAFGLQLNMELQLAAQLTEKHILRTQTLLCDMLLRDAPIGIVTQSPSI

SEQ ID NO: 8466 - protein, 434 aa, Geobacter metallireducens GS-15
MRNELVTPGAGELTYEIRNIVNVAEKLQKHGVKINWENIGDPIVKGEEIPRWMKEIVANEVMENDTWGYCHTRGVLETREFICGLTNNRGGARITPDDIIFFNGLGDAISTVYGNLRHESRILMPSPTYTTHSIGEAAHAQASPVCYRLDPANNWFPDLEDMENHVRYNPQISGILLINPDNPTGMVFSRETLEKIVAIARKYELFIIADEVYNNITYNGQTTVPISDVIGDVPAIAMKGISKEIPWPGSRCGWIEVYNGAKDDQFRKYINSILSAKMNEVCSTTLPQKCIPAIMKHPEYQTYLQERIRRYEKMSTITFDCLREVPELMVNRTNGAFYMSVAFRDGLLTNGQSLPIENAEVRELVEGLVNAPGVSPDKRFVYYLLASTGICIVPLSSFNTPLQGFRVTLLEKDEAECLRIYQTLAKKIAEYLKS

SEQ ID NO: 8467 - protein, 523 aa, Buchnera aphidicola (Uroleucon ambrosiae)
  misc_feature (310)..(310): Xaa can be any naturally occurring amino acid
MAAKDVKFGNEARIKMLRGVNVLADAVKVTLGPKGRNVVLDKSFGAPSITKDGVSVAREIELEDKFENMGAQMVKEVASKANDAAGDGTTTATLLAQSIVNEGLKAVAAGMNPMDLKRGIDKAVISAVEELKNLSVPCSDSKAITQVGTISANADEKVGALIAEAMEKVGNDGVITVEEGTGLQNELEVVKGMQFDRGYLSPYFINKPETGIVELENPYILMADKKISNVREMLPILESVAKSGKPLLIISEDLEGEALATLVVNSMRGIVKVAAVKAPGFGDRRKAMLQDISILTGGSVISEELAMELXKSTLEDLGQAKRVVISKDTTTIIGGIGEKHTIQSRISQIRQEIQEATSDYDKEKLNERLAKLSGGVAVLKVGAATEVEMKEKKARVEDALHATRAAVEEGVVAGGGVALVRVAGKISHLRGQNEDQNVGIRVALRAMEAPLRQIVSNSGEEPSVVTNNVKDGKGNYGYNAASDQYGDMIDFGILDPTKVTRSALQYAASVAGLMITTECMVTD

SEQ ID NO: 8468 - protein, 154 aa, Zea mays
MSLVRRSNVFDPFSMDLWDPFDTMFRSIVPSAVSTNSGTATFASARIDWKETPEAHVFKADLPGVKKEEVKVEVEDGNVLVISGQRSREKEDKDDKWHRVERSSGQFVRRFRLPENAKMDQVKAGLENGVLTVTVPKAEEKKPEVTAMAIEISG

SEQ ID NO: 8469 - protein, 238 aa, Avena sativa
IENKISRQVTFAKRRNGLLKKAYELSLLCDAEDALIIFSGRGRLFEFSSSSCMYKTLERYRTCNYNSQEAAPLVENEINYREYLKLKTRVEFLQSSQRNILGEDLGPLSMKELDQIESQIDVSLKHIRSRKNQVLLDQLFDLKSKEQELQDQNKDLRKKLQEMSCGENAVHMSWQDGGGQSSSSGQAVDPYPGPLQHPEHDSSMQIGYHQTYMEQLBNEDHTASHHPNAQPGSSAGWI

SEQ ID NO: 8470 - protein, 548 aa, Desulfovibrio desulfuricans G20
MASKEIVFDTKARERLARGVDKLANAVKVTLGPKGRNVVIEKSFGAPVITKDGVSVAKEIELEDKFENMGAQMVKEVASKTSDIAGDGTTTATILAQAIYKEGVKLVAAGRNPMAIKRGVDKAVEALVKELGNLAKPTRDQKEIAQVGTISANSDTTIGNIIAEAMSKVGKEGVITVEEAKGLETTLEVVEGMQFDRGYLSPYFVTDPEKMVCEMDEPLILINEKKISSMKDMLPVLEQVAKMNRPLVIIAEDVDGEALATLVVNKLRGTLQVVAVKAPGFGERRKAMLEDIATLTGGRVISEEMGIKLENATVADLGNAKRIVVDKENTTIVDGAGESEAIKARVKMIRAQIEETSSDYDREKLQERLAKIVGGVAVINVGAATETEMKEKKDRVEDALNATRAAVEEGIVPGGGTALVRCCKVLDDVKPADDDEAAGVTIIRRAIEEPLRQIAANAGFEGSIICEKVKEGKDAFGFNAATGEFEDLIAAGVIDPKKVSRIALQNAASVASLLLTTECAIAEKPKEDAPAAPAMGGMGGMGGMGGMY

SEQ ID NO: 8471 - protein, 192 aa, Dacrydium franklinii
DDHGEVISEIRKSDLEPYLGLHYPATDIPQASRFLFMKNRVRMICDCQAPPIRVVEGKRLPRELNLCGSTLRAPHGCHAQYMSNMGSIASLVIAVIVNEKDEEEGDSEGQHQQKGKRLWGLVVCHHTSPRFVPLPLRYACEFLMQVFGIQLNKEVELAAQTREKHILRTQTLLCDMLLRDAPTGIVTRKPNI

SEQ ID NO: 8472 - protein, 222 aa, Chasmanthium latifolium
IENKISRQVTFAKRRNGLLKKAYELSLLCDAEVALIIFSGRGRLFEFSSSSCMYKTLERYRSSNYNSQEVKAPLDSEINYQEYLKLRTRVEFLQTTQRNILGEDLGPLSMKELEQLENQIEISLKHIRTRKSQVLLDQLFDLKTKEQELEDISKGLRKKLHETSGENALHISWEEGGHSGASGNAVEPYQGFQQHRENESSLQIGYRQQAYMEQLNNEDMED

SEQ ID NO: 8473 - protein, 225 aa, Danthonia spicata
IENKISRQVTFAKRRNGLLKKAYELSLLCDAEVALIIFSGRGRLFEFSSSSCMYKTLERYRTCNFNSQEAKAPLDSEINYQEYLKLKTRVEFLQTTQRNILGEDLGPLSSKELEQLENQIEISLKHIRTRKNQALLDQLFDLKSKEQELQDLNKDLRKKLQETSGENAVHISWEEGGHSGASGNAMEPSQGFLQHPENDSDLHMGYHQQAYMDHLNNEDMAAPHH

SEQ ID NO: 8474 - protein, 189 aa, Dacrydium franklinii
DDHGEVIAEMRRSDLEPYLGLHYPATDIPQAARFLFMKNKVRMICDCRGMPVKMIQSKKLEQPLSLSGSTLRAPHGCHAQYMANMGSVASLVMSVTINDNNGNDEDRENGGSRRLWGLVVCHHTSPRFVPFPVRYACEFLMQVFGIQLNKELELAAQLREKHILRTQTVLCDMLLRDAPVGIVTQNPNI

SEQ ID NO: 8475 - protein, 490 aa, Zea mays
MVLSKAVSESDMSVHSTFASRYVRSSLPRYRMPENSIPKEAAYQIINDELMLDGNPRLNLASFVTTWMEPECDKLIMAAINKNYVDMDEYPVTTELQNRCVNMIAHLFNAPLGESETAVGVGTVGSSEAIMLAGLAFKRRWQNKRRAEGKPFDKPNIVTGANVQVCWEKFARYFEVELREVKLRDGYYVMDPEKAVEMVDENTICVAAILGSTLNGEFEDVKLLNDLLQAKNRETRWETPIHVDAASGGFIAPFLYPDLEWDFRLPLVKSINVSGHKYGLVYAGIGWCIWRSKEDLPEELIFHINYLGADQPTFTLNFSKGSSQVIAQYYQLIRHGFEGYRNIMENCHENAMVLKEGLEKTGRFDIVSKDEGVPLVAFSLKDRSRHDEFEISDMLRRFGWIVPAYTMPPDAQHVTVLRVVIREEFSRTLAERLVLDIEKVMYQLDALPSRLPPPPPAAPLLRKKTELETQRSVTEAWKKFVLAKKTNGVC

SEQ ID NO: 8476 - protein, 225 aa, Ehrharta erecta
IENKISRQVTFAKRRNGLLKKAYELSLLCDAEVALIIFSGRGRLFEFSSSSCMYKTLERYRSCNYNSQEAAPENEINYQEYLKLKTRVEFLRTTQRNILGEDLGPLSMKELEQLENQIVVSLKQIRDKKNQALLDQLFELKSKEQELRDLNKDLRKKLQETTGDNVLHMSWQDGGGQHSGSSGLTAEHHQGLLHHQDQGNHSLQIGYHQAYMDHLNNEAEMAGHN

SEQ ID NO: 8477 - protein, 229 aa, Eleusine coracana
LENKISRQVTFAKRRNGLLKKAYELSLLCDAEVALIIFSAGRGRLFEFSSSSCMYKTLERYRTCNFNSHEVKAPLDSKINYQDYLKLKTRVEFLQTTQRNILGEDLGPLSNKELEQLEKQIEISLTQIRSRKNQMLLVQLLDLKSKEQELQDLNKDLRKKCQLKKTCGENATHISWEEGGHSGTSRNANEPNQGFLQHAENNYSSLQIGYYQQAYMDQLNNQDIGAAHN

SEQ ID NO: 8478 - protein, 245 aa, Arabidopsis thaliana
MALETLNSPTTTTTARPLLRYREEMEPENLEQWAKRKRTKRQRFDHGHQNQETNKNLPSEEEYLALCLLMLARGSAVQSPPLPPLPSRASPSDHRDYKCTVCGKSFSSYQALGGHKTSHRKPTNTSITSGNQELSNNSHSNSGSVVINVTVNTGNGVSQSGKIHTCSICFKSFASGQALGGHKRCHYDGGNNGNGNGSSSNSVELVAGSDVSDVDNERWSEESAIGGHRGFDLNLPADQVSVTTS

SEQ ID NO: 8479 - protein, 484 aa, Proteus mirabilis
  misc_feature (53)..(53): Xaa can be any naturally occurring amino acid
MEKKKLTTAAGAPVVDNNNVITAGPRGPMLLQDVWFLEKLAHFDREVIPERRXHAKGSGAFGTFTVTHDITKYTRAKIFSEVGKKTEMFARFSTVAGERGAADAERDIRGFALKFYTEEGNWDMVGNNTPVFYLRDPLKFPDLNHIVKRDPRTNMRNMAYKWDFFSHLPESLHQLTIDMSDRGLPLSYRFVHGFGSHTYSFINKDNERFWVKFHFRCQQGIKNLMDDEAEALVGKDRESSQRDLFEAIERGDYPRWKLQIQIMPEKEASTVPYNPFDLTKVWPHADYPLMDVGYFELNRNPDNYFSDVEQAAFSPANIVPGISFSPDKMLQGRLFSYGDAHRYRLGVNHHQIPVNAPKCPFHNYHRDGAMRVDGNSGNGITYEPNSGGVFQEQPDFKEPPLSIEGAADHWNHREDEDYFSQPRALYELLSDDEHQRMFARIAGELSQASKETQQRQIDLFTKVHPEYGAGVEKAIKVLEGKDAK

SEQ ID NO: 8480 - protein, 548 aa, Pseudomonas fluorescens PfO-1
MAAKEVKFGDSARKKMLVGVNVLADAVKATLGPKGRNVILEKSFGAPTITKDGVSVAKEIELEDRFENMGAQLVKDVASRANDDAGDGTTTATVLAQSIVNEGLKAVAAGMNPMDLKRGIDKATIAVVAELKKLSAPCTDTKAIAQVGTISANSDNSIGDIIAEAMEKVGKEGVITVEEGSGLENELSVVEGMQFDRGYLSPYFVNKPDTMVAELEGALILLVDKKISNIREMLPVLEAVAKAGRPLLIVAEDVEGEALATLVVNNMRGIVKVAAVKAPGFGDRRKAMLQDIAVLTGGTVISEEIGLSLESTTLEHLGSAKRVTLSKENTIIVDGAGNDGDIQARIAQIRAQVAETSSDYDREKLQERLAKLSGGVAVIKVGAGSEVEMKEKKARVEDALHATRAAVEEGVVPGGGVALIRALNAIINLKGDNADQDVGIAVLRRAVEAPLRQIAANSGDEPSVVVNEVKNGKGNFGYNAATGEYGDMIEMGILDPTKVTRSALQAASSIGGLILTTEAAVADAPKKDGAAGGGMPDMGGMGGMGGMM

SEQ ID NO: 8481 - protein, 135 aa, Triticum aestivum
MATISSTSYFSSQPQLPASDGANPATTRSSSSNGRQPRRRRTGRCVMLEVDAASGSGSGGAAVGRTRSLTEEDLEELKACLDLGFGFSYHEIPGLRGTLPGLELCYSMTRRFLDEQRTLVGQLEPAAAAAATPIP

SEQ ID NO: 8482 - protein, 765 aa, Saccharophagus degradans 2-40
MLLLFQRVRNLPLTAKAYITIVIAAAVAVAWVSAVEWSIATNKHQQHIATATKNARQQLNQAIQTGNQLVLEHCLTNLVAQSIIKRATLIGPSSRQEKTSLNYATSEGFSTLREPLDAGWVLEMQVSTGMTAFLERLVIDLVGILLITGALLLYVRLALVSKLLQLNFAARTLNLENLNRSLLPKKSRQPQKRAADSQDELDSLLQALERIRLSMLEDREQRRTVELALMREKEEKIETRRLVQEAEAANRAKSQFIATMSHEIRTPMNGVIGMVEMLRDTTLDDSQRHYLGIIERSGDSLMNIINDILDYSKIEAGKMSLEHMQFDLEELLEDCVQMFSASTDKRNIELICSISPNTPKQLMGDPTRLKQVLVNLIGNAFKFTSEGHIYVEARQVNASDADLPMIHFSVEDSGIGIESNQQEKLFDAFCQADGSTTRKFGGTGLGLTICKQLAEMMGGEIGVYSREKAGSTFWFSAVFTHVEKAINEQPPQSLAGKKLLVVNQSKIVEKVIASHAADWNIACRIVHSGEKALEVISGQHHYDFIILSQDLQDMPGLDVADKVRTLAAYSSTPIFLVTKVRKSQLPEDRLHTITALLPYPLSIHKIENLLQTKPTHTVVEEQKTNTQATTVSEGPLHVLVAEDNPVNRMVIEGLLAKFDIAPKFAEDGLQALNAVTESPTPYDLIIMDCEMPEMDGFEATRSIRTWESNNNQPATTIIALTAHVEAEHRQRVFDSGMNYYLSKPVTMEKLSEALTTAGLAPQIAS

SEQ ID NO: 8483 - protein, 207 aa, Pennisetum glaucum
MATRRRMLLKVIILGDSGVGKTSLMNQYVNKKFSNQYKATIGADFLTKEVQIDDRLFTLQIWDTAGQERFQSLGVAFYRGADCCVLVYDVNVTKSFEKLNNWREEFLLQASPSDPENFPFVLLGNKIDVDGGNSRTISEKKAKAWCASKGNIPYFETSAKEGFNVEAAFECIARNAIKNEPEDDMYLPDTIDVGGAGRQQRSSGCEC

SEQ ID NO: 8484 - protein, 541 aa, Nocardia farcinica IFM 10152
MAKTIAYDEEARRGLERGLNSLADAVKVTLGPKGRNVVLEKKWGAPTITNDGVSIAKEIELEDPYEKIGAELVKEVAKKTDDVAGDGTTTATVLAQALVREGLRNVAAGANPLGLKRGIEKAVEAVTAKLLDTAKEVETKEQIAATAGISAGDASIGELIAEAMDKVGKEGVITVEESNTFGLQLELTEGMRFDKGYISGYFVTDPERQEAVLEDPYILLVGSKVSTVKDLLPLLEKVIQAGKPLLIIAEDVEGEALSTLVVNKIRGTFKSVAVKAPGFGDRRKAQLADIAILTGGEVISEEVGLSLETAGIELLGQARKVVVTKDETTIVEGAGDAEAIKGRVAQIRTEIENSDSDYDREKLQERLAKLAGGVAVIKAGAATEVELKERKHRIEDAVRNAKAAVEEGIVAGGGVALLQAAPALDELKLTGDEATGANIVRVALSAPLKQIAFNAGLEPGVVAEKVSNLEAGHGLNADSGEYEDLLAAGVADPVKVTRSALQNAASIAALFLTTEAVVADKPEKAAAPAGDPTGGMGGMDF

SEQ ID NO: 8485 - protein, 375 aa, Staphylococcus aureus subsp. aureus COL
MKSKYEPLFDKVELPNGVELRNRFVLAPLTHISSNDDGTISDVELPYIEKRSQDVGITINAASNVSDVGKAFPGQPSIAHDSNIEGLKRLATAMKKNGAKALVQIHHGGAQALPELTPDGDVVAPSPISLKSFGQKQEHSAREMTNEEIEQAIKDFGEATRRAIEAGFDGVEIHGANHYLIHQFVSPYYNRRNDVWANQYKFPVAVIEEVLKAKEAYGNKDFIVGYRLSPEEAESPGITMEITEELVNKISHMPIDYIHVSMMDTHATTREGKYAGQERLPLIHKWINGRMPLIGIGSIFTADEALDAVENVGVDLVAIGRELLLDYQFVEKIKDGREDEIINYFDPEREDNHHLTPNLWHQFNEGFYPLPRKDK

SEQ ID NO: 8486 - protein, 541 aa, Lactobacillus plantarum
MAKELKFSEDARSAMLKGVDQLADTVKSTLGPKGRNVVLEQSYGSPTITNDGVTIAKAIELDDHFENMGAKLVSEVASKTNDIAGDGTTTATVLTQSIVNEGMKNVTAGANPVGIRRGIEEATKTAVDSLHAMAHEVKTQEDIAQIASVSSASEETGKLIAEAMEKVGHDGVITIEESRGVDTSLDVVEGMQFDRGYLSQYMVTDNDKMEADLDNPYILITDKKISNIQDILPLLQSIVEQGKPLLIIADDISGEALPTLVLNKMRGTFNVVAVKAPGFGDRRKEQLQDIAILTGGTVITDDLGLELKDTTIDQLGQANKVTVTKDNTTIVEGAGSKDAISERVEFIRNQIGETTSDFDKEKLQERLAKLAGGVAVVRVGAATETELKERKYRIEDALNATRAAVEEGFVAGGGTALINVIKDVAALKETGDVQTGINIVKRALEEPVRQIAENAGLEGSVIVEKMKEQKPGVGFNAATDEWVDMIKAGIVDPTKVTRSALQNAASVSALLLTTEAVVAEKPEENAPAAPAAPNPGMGGMM

SEQ ID NO: 8487 - protein, 143 aa, Cichorium intybus
MAREKIKIRKIDNITARQVTFSKRRRGLLKKAEELAVLCDADVALVIFSATGKLFEYASSSMQELLGKYKLHSTNNVNKVDEPSLDLQLVESQESRMSQEVLEKDRELSQLRGEDLQGLTLEELQRLESLLEGRLNRVAPDKG

SEQ ID NO: 8488 - protein, 370 aa, Pseudomonas aeruginosa UCBPP-PA14
MLFSPYAFGHLTLPNRIVMPPMTRSRAASGEVATALMAEYYSQRAGAGLIVSEGTQISRQGQGYAWTPGIHSAEQVAGWRQVTDAVHAAGGRIFAQLWHVGRVSHTSLQPGNAAPVSSSALVAEGVKVFVDPQGRGAQAGGGEMVQHSAPRALAVEEIREIVADYAQAARNALDAGFDGVELHGANGYLINQFIDSQANARNDQYGGSLENRLRFLREVAEAVTAVVGRERIGVRLAPLTTLQGAVDDTPQATYLAAARLLDEIGVAYIHIAEADWEDAPAMPAAFKEALRIVYRGSLIYSGMYTKARAEEALAKGWADLIGFGRPFIANPDLPYRLEHDLALADGDRSTYFGGGAAGYTDYPSLPQAAG

SEQ ID NO: 8489 - protein, 693 aa, Pseudomonas syringae pv. tomato str. DC3000
MKQLLPSTALALFVGLGVLPMSASTFAANSWDNLQPDRDEVIASLNVVELLKRHHYSKPPLDDKRSAIIYQSYIKQLDPSRSYFMASDIAEFDKWQFQFDDFLKSGDLNPGFTIYKRYLDRIKARLDFALAELSKGVDKLDFNTKETLLVDRKDAAWPKDTAELDELWRKRIKDEVLRLKIAGKDPAKIQETLTKRYKNQQARLNQTRAEDIFQAYINTFAMSYDPHTNYLSPDSAENFDINMSLSLEGIGAVLQSDNDNVKIVRLVPAGPAAKTKQVAPADKIVAVAQGDKEMVDVIGWRLDEVVKLIRGPKGSVVRLEIIPASNAPNDQTSKIVAITREAVKLEEQAAKKSILHLKQDGKDYKLGVIDIPAFYLDFKAYRAGDPEYKSTTRDVKKLLTELQAEKVDGVVLDLRNNGGGSLQEATELTSLFIDKGPTVLVRNADGKVDVLEDEAKGAFYKGPMALLVNRLSASASEIFAGAMQDYHRALVIGGQTFGKGTVQTIQPLNHGELKLTLAKFYRVSGQSTQHQGVVPDITYPSLIDTKEIGESALPEAMPWDSIKPAIKPAIDPFKPFLAQLQSRHEARSSKDAEFVFIEDRLALAKKLMNEKTVSLNEADRRAEHASIEGKQLALENTRRKAKGEEPLKELKKEDEDALPVEDEKTKPEDDAYLAETGRILIDYLGLSAAVAKK

SEQ ID NO: 8490 - protein, 192 aa, Gnetum gnemon
DDHGEVISEIRRSDLEPYLGLHYPATDIPQASRFLFLRNRVRMICDCYAQPVKVIQDKKLSKDLSFCGSTLRAPHGCHSQYMANMGSVASLVLAVIVNEREEEEGDSENQVEQKGRKLWGLVVCHHTSPRFVPFPMRYACEFMMQVFSIQLNKEVELAFQVREKHILRTQTLLCDMLLRDAPLGIVTQKPNI

SEQ ID NO: 8491 - protein, 310 aa, Zea mays
MARHFVLNTGAKIPSVGLGTWQSDPGVVGNAVYAAVKAGYRHIDCARVYGNEKEIGLALKKLFEEGVVKREDLFITSKLWNDHHAPEDVPEALNDSLNDLQLEYLDLYLIHWPFRVKKGTNTSPENFVTPDFPATWGAMEKLYDAGKARAIGVSNFSSKKLGDLLAVARVPPAVDQVECHPGWQQTKLHSFCQSTGVHLTAYSPLGSPGTTWMNGNVLKEPIIISIAEKLGKTSAQVALRWNIQMGHSVLPKSTNEERIKQNLDVYDWSIPDDLLAKFSEIKQARLLRGNFIVNPESVYKTHEELWDGEL

SEQ ID NO: 8492 - protein, 235 aa, Leersia virginica
LENKISRQVTFAKRRNGLLKKAYELSLLCDAEVALIIFSGRSRLFEFSSSSCMYKTLERYRSCNYNSQDAAAPENEINYQEYLKLKTRVEFLQTTQRNILGEDLGPLSMKELEQLENQIEVSLKQIRTRKSQALLDQLFDLKSKEQQLQDLNKDLRKKLQETSAENVLYMSWQDGGGHSGSATVLAADQPHHHQGLLHPHPEGDHSLQIGYHHTHHHHQAYMDHLNNEADMVAHH

SEQ ID NO: 8493 - protein, 192 aa, Ginkgo biloba
DDHGEVVAEIRRSDLEPYLGLHYPATDIPQASRFLFMKNRVRMISDCLAPPVKVIQDKGLPRDLSLCGSTLRASHGCHAQYMSNMGSIASLVLAVIINEKEDEEGDSEGPQQQKGRKLWGLVVCHHTSPRFVPFPLRYACEFLMQVFGIQLNKEVELAAQLREKHVLRTQTLLCDMLLRDAPMGIVTQIPNI

SEQ ID NO: 8494 - protein, 225 aa, Lithachne humilis
IENKISRQVTFAKRRNGLLKKAYELSLLCDAEVALVIFSGRGRLFEFSSSSCVHKTLERYRSCNYNTQEANAPVENEINYHEYLKLKTRVDFLQTNQRNILGEDLGPLSMKELEQLDNQIETSLKQIRSRKNQVLLDQLFDLKSKEQELQDINKDLRKKLQETNGDQKVVHINSWQDGGQGSSSGHAIEPYQGLIQHPENDPSMQIAYHQVYMDQLNHEDMAAQH

SEQ ID NO: 8495 - protein, 406 aa, Oryza sativa
PQQPPTPLNFLIRRRRQDVRRRRRRREEAAGLRGAEREREEGAVRGAGGAVPARLRAPELIYLTDGASKGVMQMLNTIIRNERDGILVPVPQYPLYSAAISLFGGSLVPYYLEEEANWGLDFVNLRQTVASARSKGITVRAMVIINPGNPTGQCLSEGNIKELLKFCFHENLVLLADEVYQQNIYQDERPFISARKVLFDMGPPMSREVQLVSFHTVSKGYWGECGQRGGYFEMTNLPPKTVDEIYKVASIALSPNVPGQIFMGLMVNPPKPGDISYLKFSAESKSILESLRRRARLMTDGFNSCRNVVCNFTEGAMYSFPQIRLPPKAIDAAKRAGKAADVFYCLKLLEATGISTVPGSGFGQKEGVFHLRTTILPAEEDMPAIMTSFKKFNDTFMDQYDGYSRM

SEQ ID NO: 8496 - protein, 222 aa, Panicum miliaceum
IENKISRQGTFAKRRNGLLKKAYELSLLCDAEVALIIFSGRGRLFEFSSSSCMYKTLERYRSSNYSSQEVKTPLDGEINYQDYLKLKTRVEFLQTTQRNILGEDLGPLSMKELEQLENQVEISLKHIRTRKNQMLLDHLFDLKSKEQELQDLNKDLRKKLQETNAENVLHVSWEEGGHSGASGNAIEPYQGFLQHPENDPSLQIGYHQQAYMDQLNNEDMAD

SEQ ID NO: 8497 - protein, 187 aa, Ginkgo biloba
DDHGEVVAEIRRSDLEPYLGLHYPATDIPQASRFLFMKNRVRMICDCCAPPVKVIQDKKLPQPLSLFGSTLRAPHGCHIQYMANMGSIASLVMSVTINENDDDNGQQQKGRKLWGLVVCHHTSPRFVPFPLRYACEFLMQVLGIQLYKEVELAAQLREKHILRTQTVLCDMLLRDAPVGIVAQTPNI

SEQ ID NO: 8498 - protein, 135 aa, Zea mays
GRGKHRIVSLVAALLILLALAVSSTRNAQEDSMADNTGTLAGGIKDVPGNENDLHLQELARFAVDEHNKKANALLGFEKLVKAKTQVVAGTMYYLTIEVKDGEVKKLYEAKVWEKPWENFKELQEFKPVEEGASA

SEQ ID NO: 8499 - protein, 222 aa, Pennisetum glaucum
IENKISRQVTFAKRRNGLLKKAYELSLLCDAEVALIIFSGRGRLFEFSSSSCMYKTLERYRSSNYGSQEVKTPSDGEINYQDYLELKTRVEFLQTTQRNILGEDLGPLSMKELEQVENQIEISLKHIKDKKNQMLLNQLFDLKSKEQELQDLNKDLRKKLQETNAESVLHLSWEEGGHSGTGGNAIEPYQGFLQHPENDPSLQIGYHQQAYIDQLNNEDMAD

SEQ ID NO: 8500 - protein, 222 aa, Setaria italica
IENKISRQVTFAERRNGLLKKAYELSLLCDAEVALIIFSGRGRLFEFSSSSCMYKTLERYRSSNYGSQEIKTPLDGEINYQDYLKLKTRVEFLQTTQRNILGEDLGPLSMKELEQLENQIEIFLKHIRTRKNQMLLDQLFDLKSKEQELQDLNKDLRKKLQETNAESVLHVSWEEGGHSGTSGNAIEPYQGFLQHPDNDPSLQIGYHQQAYMDQLNNEDMGD

SEQ ID NO: 8501 - protein, 317 aa, Glycine max
  misc_feature (96)..(96): Xaa can be any naturally occurring amino acid
  misc_feature (112)..(112): Xaa can be any naturally occurring amino acid
MVNVMEWQKQRWQPNGNAEMMYVKVMTDEQLETLRKQIAVYATICEQLIEMHKNISSHQDLAGIRLGNMYCDPLLGSGGHKIASRQRGTPFAMQLXILERIFDQGNWNPARXKIEEITNELHQFGQISETNVYKGVQNRRARSKRKQQNVAPSANVESEVETEVDSKDKKTKPDEFQAPPSVSAGPADNLGFQNHDSSQYLNPESNKPDSVFPSDGTRHFHHVPAFDGLLSNSRNICHTSDSKGFTDQACYTAPPIVGLSAPVRGPPPDGIKLRPPPPPQFSNFFFTYIQSTNDSSSIFISVVFFPQLSHDFGKAFN

SEQ ID NO: 8502 - protein, 90 aa, Kluyveromyces lactis
PAFVNKLWSMVNDKSNEKFIHWSTSGESIVVPNRERFVQEVLKKYFKHSNFASFVRQLNMYGWHKVQDVKSGSMLSNNDSRWEFENERHA

SEQ ID NO: 8503 - protein, 124 aa, Glycine max
MAAISLRKGNTRLPPEVNRVLYVRNLPFNITSEEMYDIFGKYGAIRQIRIGTNKDTRGTAFVVYEDIYDAKTAVDHLSGFNVANRYLIVLYYQQAKMSKKFDQKKKEDEIARMQEKYGVSTKDK

SEQ ID NO: 8504 - protein, 483 aa, Arabidopsis thaliana
MADLLRKVKSIKKKQDQSNHQALILGKYEMGRLLGHGTFAKVYLARNAQSGESVAIKVIDKEKVLKSGLIAHIKREISILRRVRHPNIVQLFEVMATKSKIYFVMEYVKGGELFNKVAKGRLKEEMARKYFQQLISAVSFCHFRGVYHRDLKPENLLLDENGNLKVSDFGLSAVSDQIRQDGLFHTFCGTPAYVAPEVLARKGYDGAKVDIWSCGVILFVLMAGFLPFHDRNVMAMYKKIYRGDFRCPRWFPVEINRLLIRMLETKPERRFTMPDIMETSWFKKGFKHIKFYVEDDHQLCNVADDDEIESIESVSGRSSTVSEPEDFESFDGRRRGGSMPRPASLNAFDLISFSPGFDLSGLFEDDGEGSRFVSGAPVGQIISKLEEIARIVSFTVRKKDCKVSLEGSREGSMKGPLSIAAEIFELTPALVVVEVKKKGGDKMEYDEFCNKELKPKLQNLSSENGQRVSGSRSLPSFLLSDTD

SEQ ID NO: 8505 - protein, 90 aa, Kluyveromyces lactis
PAFVNKLWSMVNDKSNEKFIHWSTSGESIVVPNRERFVQEVLAKYFKHSNFASFVRQLNMYGWHKVQDVKSGSMLSNNDSRWEFENERHA

SEQ ID NO: 8506 - protein, 377 aa, Frankia sp. CcI3
MVCLRGGRGGGGTLSCRRATVADGAPAQWASRDGWNEAMTATDTVTPSDNRAPRDNREPTTGPVPRRADPANSRGNATRPRSMAKAHAEQIVMVVTIVVPLVALAVAIPAMWGQWISWRDVVLAVVFYGITGHGVTIGFHRYFTHRGFRTSRPVRIALAVAGNMAIEGPVIRWVADHRRHHAFSDTEGDPHSPWRYGPGTWSLIKGLWHAHVGWLFDVEQTDQRRFAPDLLDDPDIMKVSRSFALCAFASLALPAVIGGLWGGSFAAALEAFFWAGLVRIALLHHVTWSVNSICHVLGSRPYRSRDRSTNVWPLALLSMGESWHNLHHAEPTSARHGVRPWQIDTSFYLIKMMETVHLVWDVRWPDPARLAAKRATA

SEQ ID NO: 8507 - protein, 503 aa, Micrococcus luteus
MEHQKTTPHATGSTRQNGAPAVSDRQSLTVGSEGPIVLHDTHLLETHQHFNRMNIPERRPHAKGSGAFGEFEVTEDVSKYTKALVFQPGTKTETLLRFSTVAGELGSPDTWRDVRGFALRFYTEEGNYDLVGNNTPIFFLRDPMKFTHFIRSQKRLPDSGLRDATMQWDFWTNNPESAHQVTYLMGPRGLPRTWREMNGYGSHTYLWVNAQGEKHWVKYHFISQQGVHNLSNDEATKIAGENADFHRQDLFESIAKGDHPKWDLYIQAIPYEEGKTYRFNPFDLTKTISQKDYPRIKVGTLTLNRNPENHFAQIESAAFSPSNTVPGIGLSPDRMLLGRAFAYHDAQLYRVGAHVNQLPVNRPKNAVHNYAFEGQMWYDHTGDRSTYVPNSNGDSWSDETGPVDDGWEADGTLTREAQALRADDDDFGQAGTLVREVFSDQERDDFVETVAGALKGVRQDVQARAFEYWKNVDATIGQRIEDEVKRHEGDGIPGVEAGGEARI

SEQ ID NO: 8508 - protein, 446 aa, Arabidopsis thaliana
MSKAWKLKLLLLLQLLLLSQHDVDSASVISYLPGFEGLLPFHLETGYIGVGEGEKVQLFYYFIKSENNPEEDPLIIWLTGGPACTALSALAFEIGPLTFKTEGYNGGLPSLVSTSYSWTKVASIIFLDQPVGTGYSYSTTPLSYKPSDTGEAKQTYEFLQKWLVENPQFVSNPIYVGGDSYAGIVVPAIVQQISIGNEHGYKPQINLKGYILGNPSTDLDSDHNSKIPYAHRMGLISDELYESLKRTCQGNYVKVDPTNTKCLKLMEDYGKCVSRINEGLILIALCDLASPNPYSGEHGGRSYLQTLVQSDLSLPTPDCYMYRYLLASHWANDEDVRRELHVVKGSIGKWMRCNWDLPYEKDIKSSVPYHRNNSIIGDYRSLVYSSDHDMMVPYIGTEAWIKSLNYSITDDWRPWFVNNQGGGHTAEYKPEESFMMFQRWISGRPL

SEQ ID NO: 8509 - protein, 333 aa, Rhodobacter sphaeroides
MKPFPTHPDAIPAELQDVMDRLGSVAIEVANRIARGGIDEDLAGLCGTNTDGDGQKALDVIADDAFRVALEGSAVRFYASEEQDTAVTLNEAGTLALAIDPLDGSSNIDTNLSVGTTFAIWPAAPRPNPSFLRLGSELIAAGYVIYGPQVCMMVSFGKGTQKYVLDPGSRSFVLVDRAVKVPPSSTEFAINASNYRHWPKPIRAYIDDCVAGTEGPRGRNFNMRWLASLVAETHRILARGGVFLYPRDSRKGYEQGRLRYLYECAPIAFVITQAGGGATDGENPILGQTPSRLHARTPFVFGSAEKVARITAYHDLPEQETSALFGNRGLFRS

SEQ ID NO: 8510 - protein, 492 aa, Hevea brasiliensis
MDPYKNLPSNAYNCSFWTTNSGAPVWNNNSSLTVGARGPILLEDYHLLEKLANFDRERIPERVVHARGASAKGFFEVTHNVSQLTCADFLRAPGVQTPVIVRFSTVIHERGSPETIRDPRGFAVKFYTREGNFDLVGNNFPVFFIRDGMKFPDVVHAFKPNPKSHIQESWRIFDFLSHVPESLHMLTFLFDDLGIPQDYRHMEGSGVNTYTLINNAGKVHCVKFHWKPTCGVKCLLEEEAIKVGGSNHSHATQDLYDSIAAGNYPEWKLYIQTMDPDHEDKFDFDPLDVTKTWPEDILPLQPVGRLVLNKNIDNFFAENEQLAFCPGIVVPGISYSEDKLLQTRIFSYSDTQRHRLGSNYLQLPVNAPKCAHHNNHHDGFMNFMHRDEEVNYFPSRCDPVRHSERFPIPSTICSGRRDKCVIEKENNFEQPGERYRSWAPDRQERFLNRMVGCLSDPRITHELRSIWISYWTQCDRSLGQKLAFRLNVRPSI

SEQ ID NO: 8511 - protein, 160 aa, Hordeum vulgare subsp. vulgare
MTGRRAVAHVFKADLPGVKKEEVKVEVEDGNVLVVSGERTKEKEDKNDKWHRVERSSGKFVRPFRLPEDAKVEEVKAGLENGVLTVTVPKTEVKKPEVKAIEISGCVFESEPFWLMCVRVLQPKYSCDLFLSSLVEASLYRVSFLGRLCTCVIAMNKCST

SEQ ID NO: 8512 - protein, 138 aa, Zea mays
ILFFFPEIEIGLGLTGFGIFFSFLGIIFFFDKGLIAMGNILFLSGLGLTIGLKSTMQFFTKPKNYKGTISFGAGFFLVLIGWPFLGMLLEAYGFVVLFSGFWPTLAVFLQRIPIIGWIFQQPFVTSFLDRYRGKRVPV

SEQ ID NO: 8513 - protein, 162 aa, Daucus carota
MDLRFMGIDHPLFDTLYHILDDDEHDTTDTGNTKRNKSRHERRYVRDAKAMATTAADVKEYPNAYLFVVDMPGLKSGDIKVQVEDGNVLVVNGERKREEEEGVKYLSMGRKVGRFLKKFVVPENANLENIKAVCQDGVLSVTVEKLPPPEPKKPKTIEVQIA

SEQ ID NO: 8514 - protein, 182 aa, Cichorium intybus
  misc_feature (169)..(169): Xaa can be any naturally occurring amino acid
MDPYKQRPSSAYNSPFWTTNAGLPVYNNTASLTVGNRGPILLEDYHLIEKLANFTRERIPERIVHARGASAKGFFEVTHDITHLTCADFLRAPGVQTPTIVRFSTVIHERGSPETIRDPRGFATKFYTREGNFDIVGNNFPVFFTRDAMAFPDVIHAFKPNPKSHIQEXWRILDFLSHHPES

SEQ ID NO: 8515 - protein, 161 aa, Zea mays
MDGRMFGLETPLMVALQHLLDVPDGDAGAGGDKAGGGGPTRTYVADARAMAVTPADVKELPGAYAFVVDMPGLGTGDIKVQVEDERVLVISGERRREEREDAKYLRMERRMGKFMRKFVLPDNADMDKISAVCRDGVLTVTVEKLPPPEPKKPKTIEVKVA

SEQ ID NO: 8516 - protein, 272 aa, Lactococcus lactis subsp. cremoris
MKLNNQIEIPELGLGVFQIPNEETAEVVKNGIINGYRLIDTAKIYENEEGTGQGIKEGLASTGLTREDLFVTSKLWGDNHSYKETIQSFEESLKKLDLDYLDLYLIHWPGTNYAYKEAWKAMEDLYKAGKVKAIGVSNFQKHHLEELLSYAEINPVLNQIELHPKLSQKELREFLKLHDIKVQAWSPLMQGQLLDNEMLKKIADKHGKSVAQIILRWDIQQEILVNVKSIKSERMIANRQIFDFALDQEDMEALNSLNEALRVGPNPDTFNF

SEQ ID NO: 8517 - protein, 774 aa, Streptomyces coelicolor A3(2)
MTPRPSSSGPDPRKTTGKKPAGKTPTGKKPAKAAKKKAPRRTTASANASATTSVSGAEVAVSPAPDAADRERLLAGTHHDPHAVLGAHRVPGGVAFRVFRPYALAVTVLSGELRVGLHDDGDGFFSGLVPLKDVPAHRLLVAYEGTEQEVEDPYRFLPTLGELDLHLLGEGRHEQLWRALGAHPTTHEGVAGTRFAVWAPNARGVRVAGGFNFWDGTGHPMRSLGSTGVWELFLPGVGAGELYKFEITRPDGSRTFRADPLARRTEVPPATSSVVHASDYTWGDEEWLAHRADAPAHEAPMSVYEVHLPSWRPGLTYRQLAEQLPAYVADLGFTHVELMPVAEHPFGGSWGYQVTGFYAPTARLGDPDDFKYLVDRLHRAGIGVLMDWVPAHFPRDDWALAEFDGRPLYEHSDPLRAAHPDWGTLEFDFGRREVRNFLVANAVYWCEEFHIDGLRVDAVASMLYLDYSREPGEWEPNEHGGRENLDAVAFLQEMNATLYRRVPGVVTVAEESTAWDGVTRATHHEGPSGFGGLGFGLKWNMGWMHDSLDYMSHEPVHRKHHHGEMTFSMVYAYSENYVLPISHDEVVHGKRSLVSKMPGDWWQQRANERAYLGFMWAHPGKQLLFMGQEFAQGAEWSEAHGPDWWLLDPEYGASADHRGVRDLVRDLNTVYRATPALWRRDTHPSGFSWVVGDAAEDNVLAFLRLDADGTPLLAVSNFAPVVRSGYRLGVPDEVPAWHEVLNTDAARYGGGDVVNPDPVKPEPQGGTAARRASG

SEQ ID NO: 8518 - protein, 364 aa, Xanthobacter flavus
MLEPNADHRAAVAQAAGVAASRITLTVMLDEWAGADARRRAVADTVCALATGCASLAAAIAEGPLAGDLARTLSSGEAGEGQKALDVISNDIVIGALKAAPVAAVASEENDAPVLLDPTAPLLVAIDPLDGSSNIDTDISVGTIFAVFPRPEGADASEPSAFLQNGRDMLAAGYVIYGPHTAMMLTLGAGTWHFALDRAGLFRLVDAEVKVKEGAAEFAINMSNYHHWDVPVRDYVDDCLAGKKGPRERDFNMRWVASMVADAHRIFQRGGIYLYPGDGRKGYTHGRLRLLYEAFPVAFLMEQASGSATDGRGAILDLSATGLHQRVPFIFGSRDEVARVSRYHLEPNGHGERSPLFARRGLFI

SEQ ID NO: 8519 - protein, 554 aa, Salmonella enterica subsp. enterica serovar Typhi Ty2
MCSIFGVFDIKTDAAELRKKALELSRLMRHRGPDWSGIYACDNAILAHERLSIVDVNAGAQPLYNAKKTHVLAVNGEIYNHQTLRAEYGDRYAFQTGSDCEVILALYQEKGPDFLDDLQGMFAFALYDSEKDAYLIGRDHIGIIPLYMGYDEFGNFYVASEMKALTPVCRTIKEFPAGSYLWSKDGEIRQYYQRDWFDYDAVKDNVTDKNALRQALEESVKSHLMSDVPYGVLLSGGLDSSVISAITKKFAARRVEDQERSEAWWPQLHSFAVGLEGSPDLKAAQEVANHLGTVHHEIHFTVQEGLDAIRDVIYHIETYDVTTIRASTPMYLMSRKIKAMGIKMVLSGEGSDEVFGGYLYFHKAPNAKELHEETVRKLQALHMYDCTRANKAMSAWGVEARVPFLDKKFLDVAMRINPQDKMCGNGKMEKHVLRECFESYLPASVAWRQKEQFSDGVGYSWIDTLKEVAAKQISDQQLETARFRFPYNTPSSKEAYLYREIFEELFPVPSAAECVPGGPSVACSSAKAIEWDEAFKTMDDPSGRAVGVHQSAYQ

SEQ ID NO: 8520 - protein, 142 aa, Zea mays
KEQFSDGVGYSWIDGLKDHASQHVSDSMMMNAGFVYPENTPTTKEGYYYRMIFEKFFPKPAARSTVPGGPSVACSTAKAVEWDASWSKNLDPSGRAALGVRDAAYEDTAGETPASADPVSDKGLRPAIGESLGTPVASATAV

SEQ ID NO: 8521 - protein, 268 aa, Brassica napus
  misc_feature (124)..(124): Xaa can be any naturally occurring amino acid
MALEAMNSPTTMSSFTVRKDRIGATDDLMNDAVFLEPWLKRKRSKRQRSPSPSSSPPRSHAKSQSQDPSEEEYLALCLLMLAKDQPRTRFQPSLPPPPQARTKLSYNCSVCGKAFLSYQALGVXEASHRIKPPTAGDSTAPSIAGEKHPTSTTIAPSGKIHECSICHKVFPTGQALGGPKPCHYEGNLGGGGGGSKSVSPSGSVSSTVSEGRNTRVIIDLNLPALPELSLHPDSVVDEKILSPLTGKKPLLLAGPAQVIKKKDLSLRI

SEQ ID NO: 8522 - protein, 206 aa, Pyrococcus horikoshii OT3 [sequence omitted]

SEQ ID NO: 8523 - protein, 1081 aa, Candida albicans SC5314
  misc_feature (736)..(767): Xaa can be any naturally occurring amino acid
MNPTKKPRLSPMQPSVFEILNDPELYSQHCHSLRETLLDHFNHQATLIDTYEHELEKSKNANKAFQQALSEIGTVVISVAMGDLSKKVEIHTVENDPEILKVKITINTMMDQLQTFANEVTKVATEVANGELGGQAKNDGSVGIWRSLTDNVNIMALNLTNQVREIADVTRAVAKGDLSRKINVHAQGEILQLQRTINTMVDQLRTFAFEVSKVARDVGVLGILGGQALIENVEGIWEELTDNVNAMALNLTTQVRNIANVTTAVAKGDLSKKVTADCKGEILDLKLTINQMVDRLQNFALAVTTLSREVGTLGILGGQANVQDVEGAWKQVTENVNLMATNLTNQVRSIATVTTAVAHGDLSQKIDVHAQGEILQLKNTINKMVDSLQLFASEVSKVAQDVGINGKLGIQAQVSDVDGLWKEITSNVNTMASNLTSQVRAFAQITAAATDGDFTRFITVEASGEMDALKTKINQMVFNLRESLQRNTAAREAAELANSAKSEFLANMSHEIRTPLNGIIGMTQLSLDTELTQYQREMLSIVHNLANSLLTIIDDILDISKIEANRMTVEQIDFSLRGTVFGALKTLAVKAIEKNLDLTYQCDSSFPDNLIGDSFRLRQVILNLAGNAIKFTKEGKVSVSVKKSDKMVLDSKLLLEVCVSDTGIGIEKDKLGLIFDTFCQADGSTTRKFGGTGLGLSISKQLIHLMGGEIWVTSEYGSGSNFYFTVCVSPSNIRYXXXXXXXXXXXXXXXXXXXXXXXXXXXXXXXXGIIELGLIPIIVRNIEDATLTEPVKYDIIMIDSIEIAKKLRLLSEVKYIPLVLVHHSIPQLNMRVCIDLGISSYANTPCSITDLASAIIPALESRSISQNSDESVRYKILLAEDNLVNQKLAVRILEKQGHSVEVVENGLEAYEAIKRNKYDVVLMDVQMPVMGGFEATEKIRQWEKKSNPIDSLTFRTPIIALTAHAMLGDREKSLAKGMDDYVSKPLKPKLLMQTINKCIHNINQLKELSRNSRGSDFAKKMTRNTPGSTTRQGSDEGSVEDMIGDTPRQGTVEGGGTSSRPVQRRSATEGSITTISEQIDR

SEQ ID NO: 8524 - protein, 345 aa, Bacillus thuringiensis serovar konkukian str. 97-27
MNSELFSPYTIKDVTLKNRIVMSPMCMYSSENEDGQVTNFHLIHYGTRAAGQVGLVMIEATAVLPEGRISNKDLGIWDDSLIEGLHKTTTFIHDNGAKAAIQLAHAGRKAELETDALAPSAIPFNETMKIPVEMSIQQIKNTILAFQQAAVRSKQAGFDVIEIHGAHGYLINEFLSPLSNKRTDEYGGSPEKRYRFLREIIDSINEVWNGPLFVRISANDYHPDGLTVQDYIQYTKWMKEQGVDLIDCSSGAVVPARIDVYPGYQVQYAKHIKEHANIATGAVGLITTGAQAEQILTNNEADLIFIGRELLRNPYFPRIAANELGFELEEPYQYERAPGKISTNK

SEQ ID NO: 8525 - protein, 1168 aa, Neurospora crassa
MSTAFQTTPNQSISVSATTSPSNRQYSSFHPGPTTREGPGSGYYANQHNAGQSSPHTSSQPHSRRPSAYDQPTGLEPHMSARTAFAQSIPAPVTSIASDQPPSSSDRRRNNMPTAVPPRTSSRHDPNTSSRRAQQAADRAAASRQSNTNGTMDPAVVDEAAARSRRQHQMTQDAHQRTTSSRGNPTPTSLPVRSQPNATSSRQQSSREASEILNNILIQQPEIDIERERERLAQAQAQAHAQAQAQAQAQAQAQAQQASNYNHHHRQETASQAMAAPGGDHGEESRRGHRSRHDHSKREKHTKFGEYILGNTIGEGEFGKVKLGWKQEGGVQVAIKLIKKDTVGNNPSRMAKIMREVAILKQLTHPNIVRLHKMEESDRHYGIVLEYASGGELFDYILNHRYLKDNAARRLFAQLVSGVGYLHKKGIVHRDLKLENLLLDRNRNIIITDFGFANTFDPNQELSEEEELNLSDREFVKRMGLDKVNDAGWRKGDLMQTSCGSPCYAAPELVVSDSLYTGRKVDVWSCGVILYAMLAGYLPFDDDPANPEGDNINLLYKYIVNTPLTFPEYVTPHARDLLRRILVPNPRKRADLFEVARHSWLSEYSHVVEFITSSTTTPSEIQNTTVPAEDEGESPHLARSASVREAPKKSTASPAIGGLVSKQGTVDPEAEAAYAKQQRDNKRRTVQVEYVAPNTTTQRGDIAGQQQPSSNANRNRNESQAPVESSDSRPTTSAKDKQLSQGPSAPKDAYNNKPPVSSRRPPSSQRNGGNAPTTGNAVAPPRPSRDGRPTADNQYLSGAAGAPTQRPTTGGSMQSGRPSYAQPAPPEVADANVHGRIQQPSKGSGSSHFGVPTTTPAEQQPSESADYGRPSISTGSRFDKVREDGVVKGHKRSSTMGEIGGKLFGRSGSLFGGRKSKRQQELQQAGEKTKRYPPVSMNNSMPGGENGSRPSLDSKRSRRSFSMGMGKKSSGGSITGSNGSQEKSNKRFSFIPPSLSRAFGYNKEDEPPALDSQQDLPIQEPSSVDQFLGREQNVSATTVDGMYTQLQDSQQGSPAVNTQYQYGRPSASQGFMPGTMPNAGSDPSVNSMPQAPGSTPQLQTMTQQDGLYDARKGNSRANRGVLQKNKRFVDYEGDGFARPHDHSGSSGPARKVMDFFRRRGKARGGENN

SEQ ID NO: 8526 - protein, 106 aa, Glycine max
MASIIVIALFAQFYKKKFPENRDFLIACIALYVIFNGLLQLIIYTKEKNAILFTYPPVGSFTSTGLVVSSKLPRFSDMYTLTIASADPKSISANDQVHFTKSVTQW

SEQ ID NO: 8527 - protein, 509 aa, Xanthomonas campestris pv. vesicatoria str. 85-10
MRVAVLSVALSLALFASPGWAQKAGPAAAQASADDPEANEAAVSKVPLDEIRRFVAVYNAVKQAYVDPVEDKKLMHSAVRGLLSDLDPHSTYFDKEDAEAFDEQATGAYDGIGVELLQQQDNTLKVIAPIDDTPAARAGIRAGDVIVAIDGKPIDASKAMEPLRGESGSKVVLTIMRDKTPKPFDVTLQRETIRVASVRSKLLEPGYGYIRISTFQADTGADFQKNLKQLQAGGKLRGLVLDLRSNPGGLLTSAVQVADDLLDKGNIVSTRGRISISDAKFDATPGDLLSGAPVVVLVDAGSASASEVLAGALRDNKRARIIGSRTFGKGSVQTVLPLDNGDSVKLTTARYYTPSGKSIQASGIMPDVLLTPEPQPGDADVPASLTDYSEATLPGHLRGDDEGEEGYSAGDVLPGDGPIAEALAELKQPGSVAKAQAARKAKAQAAQKAKPAKTGADPKPAAARPATTDKPTSAEPAGKAKPATAPAAPAEPVQPAPPKDTPASTEPAN

SEQ ID NO: 8528 - protein, 261 aa, Physcomitrella patens
MVEKVVVSSLRVKRGGNLLAPLKRNVSSIAKKSSTPKSGKPVGSPKVYKGVRMRTWGKWVSEIREPNKRSRIWLGSFPTAEMAAKAYDAAAVCLRGRSVKLNFPDSPPRCAARCNSPREVQAAATAAAVACIPSATALTVANFQSPAQTLESSPLHSSPSSSDMSSGDEDSGEDSVQSFVAEGSQISPSEVVPVLEWVKVEFGDKETVAAGDVDFDCDYSFISEFAADSLLACSYNSKGRTEYLPIETHDAALYDSTLWFF

SEQ ID NO: 8529 - protein, 184 aa, Oryza sativa
MLRRRGFCCCSGAPTAAAAALLLLAVAAAAPRAAGFHLGGDESVLVRGMLAAIRREQAEAEDAARFAVAEYNKNQGAELEFARIVKAKRQVVTGTLHDLMLEVVDSGKKSLYSAKVWVKPWLDFKAVVEFRHVGDSQSQSATAADDNAGQDTADPTVASRNDLHNTENNKVSVVLSTFSQTYSV

SEQ ID NO: 8530 - protein, 347 aa, Synechocystis sp. PCC 6803
MTVSEIHIPNSLLDRDCTTLSRHVLQQLNSFGADAQDLSAIMNRIALAGKLIARRLSRAGLMADVLGFTGETNVQGESVKKMDVFANDVFISVFKQSGLVCRLASEEMEKPYYIPENCPIGRYTLLYDPIDGSSNVDINLNVGSIFAIRQQEGDDLDGSASDLLANGDKQIAAGYILYGPSTILVYSLGSGVHSFILDPSLGEFILAQENIRIPNHGPIYSTNEGNFWQWDEALRDYTRYVHRHEGYTARYSGALVGDIHRILMQGGVFLYPGTEKNPDGKLRLLYETAPLAFLVEQAGGRASDGQKRLLDLIPSKLHQRTPAIIGSAEDVKLVESFISDHKQRQGN

SEQ ID NO: 8531 - protein, 480 aa, Listeria monocytogenes EGD-e
MKELLTFPKDFWWGSAWSAEQAEGRGDTGKAKTVWEHWFETEPNRFYEGVGSEITTDHFNRYKEDVQWMKKTGQNSFRISISWARMFPDDGVGEVNQKAIAFYRDLLTEMNENGVKPFANLYHFDMPVALQDAGGWESREVVDAYVHFADTCFKEFGDLVYHWFTFNEPLGPILGGYLEGFHYPNQIDFKRGTQAGFNTILAHTLAIKAFKKINLSSKIGVILNLSPTYPRSQNEYDLEAAEICDAFYTRSFLDPMVKGTFPEKLVEIMREYDQMPEYTEEDLTIIKENTAQILGLNYYEPRRVKARLTAINEKSPFLPDWFFEPHNMPGKRMNIYRGWEIYERGIYDLCIDIRDNYGNIESFISENGMGVANEERFLNEEGQIQDDYRIQFVKDHLAYVHQAIAEGCDIKGYHLWTFIDCWSWINAYKNRYGLVSLDVETGKRTMKKSGEFYKKMSDMNGFEYETSKLVGTKREETTNG

SEQ ID NO: 8532 - protein, 206 aa, Clostridium perfringens str. 13
MLIKTIPVGMYQANCYVVIDEETKDCIMVDPGEEASRIENVIESLDAKPKMILLTHGHFDHVGAVQKLAEKYKIPFYIDKKDEDMIERNVDVFGKLPKADGYLKDGDTLKFSDNYEIKCLETPGHTPGGLCFLIDNCLFTGDTLFRESIGRSDFEGGNHATLLKSINDKLVPLGDDIVVYPGHGPSSTIKHERQRNPFLAGDFYVY

SEQ ID NO: 8533 - protein, 488 aa, Carica papaya
MGFGTNQSLLSKIATNDRHGEDSPYFDGWKAYDRNPFHPTRNPDGVIQMGLSENQLCFDLIEKWVKKNPNASICTAEGVENFKHIANFQDYHGLKEFRQEVAKLMGKARGGRVTFDPERIVMSGGATGASETIMFCLADPGDASLVPTPYYPAFNRDLRWRTGVQIIPVQCSSSNNFTVTREAVEAAYQKAQEANINVKGLIITNPSNPLGTTLDSQTLQSLVNFVNDKTIHLVCDEIYAATVFSSPEFVSIAEIIQEMDVNRDLIHIIYSLSKDMGLPGFRVGIVYSYNDGVLSCGRRMSSFGLVSSQTQYFLATLLSDDEFVDYFLRESSKRLARRHHKLTRGLEQVGIKCLKSNAGLFVWMDLRRLLEGPTSFDAEMKLWRTIVNDVKLNVSPGSSFHVAEPGWFRVCFANMEEETMDVALQRIQAFVCRAKEREAAAAATTNKKRGTMNLRLSFSSRNQVYEEQYYAMSPHMMSPRSPLVEART

SEQ ID NO: 8534 - protein, 494 aa, Zea mays
MDPTKFRPSSSHDTTVTTTNAGAPVWNDNEALTVGPRGPILLEDYHLIEKVAHFARERIPERVVHARGASAKGFFECTHDVTSLTCADFLRAPGVRTPVIVRFSTVIHERGSPETIRDPRGFAVKFYTREGNWDLLGNNFPVFFIRDGIKFPDVIHAFKPNPRSHVQEYWRVFDFLSHLPESLHTFFFLFDDVGVPSDYRHMEGFGVNTYTFVSAAGKAQYVKFHWKPTCGVRCILTDEEAALVGGRNHSHATQDLYDSIAAGSFPEWTLYVQVMDPDTEEQYDFDPLDDTKTWPEDLLPLRPVGRLVLDRNVDNFFNENEQLAFGPGLVVPGIYYSDDKMLQCRVFAYADTQRYRLGPNYLMLPVNAPRCAHHNNHYDGAMNFMHRDEEVDYYPSRHAPLRQAAPPTPLPPRPVAGRREKATIRKPNDFKQPGERYRSWDADRQDRFVRRFADSLGHPKVSQELRSIWIDLLAKCDASLGMKIATRLNMKPNM

SEQ ID NO: 8535 - protein, 648 aa, Pseudomonas aeruginosa UCBPP-PA14
MNFPHLFSPLEIRGKRLKNRIMSSGHDTSMPTDNLVNEPLVAYHRARARGGAGLIVMQVAGVHDSARYTSHVLMATDDACIPGYRRVAEACHAEGCVVLSQIFHPGREIMESADGLLAVAYSASASPNERFRVMPRELDQPLIDEIVAGYAAAARRLHQAGLDGVEVVASHGYLPAQFLNPRVNRRTDGYNGDLDARLRFLREVLAAVRAATSEDFIVGLRLSADERDPEGLSESESLQAAEAVQGELDYLHIVAGTSASLGGAIHIVPPMAIEPAYLAREAGTFKARLAIPLFVTGRINQPQEAEAILARGQADVCGMTRALICDPQMPNKAEAGRSDDVRACIACNQACIGHFHRGYPISCIQHPETGRELTYATPNPASRRKRVLVAGGGPAGMKAAAVAAQRGHEVVLCEAGAQLGGQVNLAQLLPRRAEFGGASTNLQREMQLAGVEVRRNTPVDRALVERERPDLVIVATGAEPYWPPFERGGELQVVDAWQVLRGEVRVGRSVLVTDWRGDWIGPGIAEKLVREGHQVRLAVNGTHCGESLPLYVRDQLAGELHRLGIPVTPYARLYGCDDTTVYMQHSASGEAMLFEEVDTLVLCQGHQPVDRLADSLHGLAEVLRIGDCLAPRTAEEAIYEGLKAAWSI

SEQ ID NO: 8536 - protein, 367 aa, Glycine max
  misc_feature (261)..(261): Xaa can be any naturally occurring amino acid
MRRWLCCTCQVEESYPSNENEHLKSPRNYGDGNQKGSKVSAPVKPETQKAPPPIEAPALSLDELKEKTDNFGSKALIGEGSYGRVYYATLNNGKAVAVKKLDVSSEPESNNEFLTQVSMVSRLKDDNFVEMHGYCVEGNLRVLAYEFATMGSLHDILHGRKGVQGAQPGPTLDWIQRVRIAVDAARGLEYLHEKVQPPIIHRDIRSSNVLIFEDYKAKIADFNLSNQAPDMAARLHSTRVLGTFGYHAPEYAMTGQLTQKXSDVYSFGVVLLELLTGRKPVDHTMPRGQQSLVTWATPRLSEDKVKQCVDPKLKGEYPPKGVAKLGAVAALCVQYEAEFRPNMSIVVKALQPLLKSPAPAPAPVPES

SEQ ID NO: 8537 - protein, 185 aa, Glycine max
MVQTKKFRGVRQRQWGSWVSEIRHPLLKRRVWLGTFETAEAAARAYDQAAILMNGQNAKTNFPTSKNQAEADDNNNTDTFLSPKALSELLSTKLRKYCKDPAPSLTCLRLDADNSHIGVWQKGAGPHSGSNWVMRLELGKKQITEEGSESTESPQSSTNGATENNEVEEEDRVALQMIEELLNWN

SEQ ID NO: 8538 - protein, 175 aa, Xylella fastidiosa 9a5c
MHPQNFQHQLKTMPQPPDETRDFVFNHTMLRVKDINASLDFYARILGFRLIDQRDFPEAQFSLYFLALLPQTVHISDNDAERRLWMSGIPGVLELTHNYGTETQEGQIYHDGNNEPRGFGHICISVPDLYSACARFDTLQVPYQKRLTDGRMKNIAFIKDPDGYWVEIISNTPLP

SEQ ID NO: 8539 - protein, 482 aa, Lactobacillus johnsonii NCC 533
MTGYTMPKGFLWGGAVAAHQLEGAWDEDGKGMSVADVMTVGSATKPREITDGVIPGKNYPNHEAIDFYHHYKGDIKLMAEMGFKAFRTSIAWTRIFPKGDEEEPNEAGLKFYDDLFDECHKYGIEPVITLSHFEIPYHLVKEYGGFTNRKLIDYFVRFARVCFKRYKNKVKYWMTFNEIDNQSSFNNDFLMATNSGILFKNGMGDKEKEAAMYQAAHYELVASALAVKEGHKINPDFQIGCMINYSPVRPLTPSSDDVLLADKFEQRRDFFSDVHVNGEYPNAVEDYIERNGYRPDITEEDKIALKEGTVDYVGFSYYQSTTVSSKKVKPDELTDLQEAIVENPTLERSDWGWEIDPEGLRISLNHLTDRYHKPLFIVENGLGAYDKREADGSVHDPYRIDYLRKHIEQMEKAVVLDGVDLMGYLPWGCIDLVSAGTGQMDKRYGFIYVDKNDKGDGTLERSKKDSFNWYKKVIESNGKDLD

SEQ ID NO: 8540 - protein, 539 aa, Moorella thermoacetica ATCC 39073
MAAKQLAFDVEARRALEKGVSTVAQAVKVTLGPKGRNVVLERKFGSPVITKDGVTVAKEIELKDPYENMGAQLCREVASKTNDVAGDGTTTATVLAQAIMLEGLKNVAAGANPIFVKKGIDRAVETVVDEIKKISIPVESKESIAHVASIAANEREIGELIADAMEKVGKDGVITVEESKGTATTVEVVEGMEFDRGYVSPYFVTNTEAMEAEFEEPYILIHEKKISAINDLLPLLEKVVRTGKPLVIIAEDIEGEALATLVVNKLRGTLNCAAVKAPGFGDRRKAMMEDIAILTGGTFLSEDLGVKLENVDLNMLGRAKKVKIAKEKTTIVEGYGKKEAVDGRIAQIKKQIEETDSDYDREKLQERLAKLAGGVAVIRVGAATETELKEKKHRVEDALAATRAAVEEGIVPGGGATLVHAIPAVEKIQAEGDEAVGVRIVRRALEEPLRQIAANAGLEGSVIVERVRSEQPGIGFDAVKEEYVDMIKAGIVDPAKVTRSALQNAASIASMLLTTEAIIAEIPKEEKAPAMPPGGGMDY

SEQ ID NO: 8541 - protein, 257 aa, Arabidopsis thaliana
MGRGKVELKRIENKINRQVTFAKRRNGLLKKAYELSVLCDAEIALLIFSNRGKLYEFCSSPSGMARTVDKYRKHSYATMDPNQSAKDLQDKYQDYLKLKSRVEILQHSQRHLLGEELSEMDVNELEHLERQVDASLRQIRSTKARSMLDQLSDLKTKEEMLLETNRDLRRKLEDSDAALTQSFWGSSAAEQQQQHQQQQQGMSSYQSNPPIQEAGFFKPLQGNVALQMSHYNHNPANATNSATTSQNVNGFFPGWMV

SEQ ID NO: 8542 - protein, 337 aa, Ashbya gossypii ATCC 10895
MQGSVRAIRSLARQFRTMSVEKIYYPRKVQTAASDASLTLNHTSFRIKDPKVSVPFYEKHFGMQLLQKLEFPEQQRDVYVMSFPKQVNKLENGAPGIFHLSGTLHLAHSHGTENDAGYRPNNGNEEPHRGFGHICFSVADLPKECERLEAEGVAFKKRMSDGRQKNIAFALDPDGYWIELIQYNLSDAEPVDLGPKFNHTMLRVKDATKSLEFYQNVLGMSLLEVSEHANAKFTLYFLGYPAADERLKRESILELTHNWGTEDDADFSYHNGNAEPTGYSHMGVSLSDPAPLCADIEETYPDLEWELRYNKGSIKNLAVLRDPDGYHIQVLPRTWSL

SEQ ID NO: 8543 - protein, 523 aa, Buchnera aphidicola (Uroleucon ambrosiae)
MAAKDVKFGNEARIKMLRGVNVLADAVKVTLGPKGRNVVLDKSFGAPSITKDGVSVAREIELEDKFENMGAQMVKEVASKANDAAGDGTTTATLLAQSIVNEGLKAVAAGMNPMDLKRGIDKAVISAVEELKNLSVPCSDSKAITQVGTISANADEKVGALIAEAMEKVGNDGVITVEEGTGLQNELEVVKGMQFDRGYLSPYFINKPETGIVELENPYILMADKKISNVREMLPILESVAKSGKPLLIISEDLEGEALATLVVNSMRGIVKVAAVKAPGFGDRRKAMLQDISILTGGSVISEELAMELEKSTLEDLGQAKRVVISKDTTTIIGGIGEKHTIQSRISQIRQEIQEATSDYDKEKLNERLAKLSGGVAVLKVGAATEVEMKEKKARVEDALHATRAAVEEGVVAGGGVALVRVAGKISHLRGQNEDQNVGIRVALRAMEAPLRQIVSNSGEEPSVVTNNVKDGKGNYGYNAASDQYGDMIDFGILDPTKVTRSALQYAASVAGLMITTECMVTD

SEQ ID NO: 8544 - protein, 115 aa, Zea mays
HASSNTLDGLNGFDGTDTHYFHSGPRGHHWMWDSRLFNYGNWEVLRFLLSNARWWLEEYKFDGFRFDGGTSMMYTHHGLQVTFTGNFNEYFGFATDVDAVVYLMLVNDLIHGLYP

SEQ ID NO: 8545 - protein, 481 aa, Populus euphratica
MVFKLNSHLLSRIASSDGHGEDSPYFDGWKAYDSDPHHPTDNPNGVIQMGLAENQLCFDLIQDWLKKNPKASICSPEGLNEFREIAIFQDYHGLPEFRNAVANFMEKVRGNRVTFDPDRIVMSGGATGAHETIAFCLADPGEAFLVPTPYYPGFDRDLRWRTGVKLIPVDSDSSNNFMVTREALENAYEKAQLDNIKVKGLLITNPSNPLGTILDRETLRSIVRFINEKNIHLVCDEIYAATVFSQPDFISVRRILQEDIECNLDLVHIVYSLSKDMGFPGLRVGIIYSYNDAVVSCARKMSSFGLVSTQTQYLIASMLSDNEFVEMFIRESKRRLAARYRVFTRGLDQVGIECLKTSNAGLFLWMDLSRLLKQQTFKAEMELWRVIIHEVKLNVSPGCSFHCLKPGWFRVCFANMDDETMQVALSRIKTFVNKEADTKKSRKNLRWQGSLKLLNSPRIYDDFINSPHSPIPQSPLVRARN

SEQ ID NO: 8546 - protein, 548 aa, Escherichia coli
MAAKDVKFGNDAHVKMLRSVNVLADAVKVTLGPKGRNVVLDKSFGAPTITKDGVSVAREIELEDKFENMGAQMVKEVASKANDAAGDGTTTATVLAQAIITEGLKAVAAGMNPMDLKRGIDKAVTAAVEELKALSVPCSDSKAIAQVGTISANSDETVGKLIAEAMDKVGKEGVITVEDGTGLQDELDVVEGMQFDRGYLSPYFINKPETGAVELESPFILLADKKISNIREMLPVLEAVAKAGKPLLIIAEDVEGEALATLVVNTMRGIVKVAAVKAPGFGDRRKAMLQDIATLTGGTVISEEIGMELEKATLEDLGQAKRVVINKDTTTIIDGVGEEAAIQGRVAQIRQQIEEATSDYDREKLQERVAKLAGGVAVIKVGAATEVEMKEKKARVEDALHATRAAVEEGVVAGGGVALIRVASKLADLRGQNEDQNVGIKVALRAMEAPLRQIVLNCGEEPSVVANTVKGGDGNYGYNAATEEYGNMIDMGILDPTKVTRSALQYAASVAGLMITTECMVTDLPKNDAADLGAAGGMGGMGGMGGMM

SEQ ID NO: 8547 - protein, 486 aa, Populus x canadensis
MERQHQLLSKIATNDRHGENSPYFDGWKAYDKNPFHPTDNPDGVIQMGLAENQLSADSIIDWIKKHPKASICNPEGVHMFKDIANFQDYHGLPEFRQAIAKFMGRVRGGRVTFDPDRIVMSGGATGANELIMFCLADPGDAFLVPSPYYPAFYRDLGWRTGVQIVPVDCDSSNNFQITKVALEAAYDKAQQDGINVKGLIITNPSNPLGTTLDRETLKCLLSFINEKNIHIVCDEIYAATIFSSQNFVSVSEVIEEVMDCNRDLIHIVYSLSKDMGLPGFRVGIVYSYNDAVVNCGRKMSSFGLVSSQTQYLLASMLSDEEFVEDFLAESSKRLKKRHGIFTKGLEQIGISCLESKAGLFVWMNLRHLLKEQTNDGEMELWRVIVNDVKLNVSPGSSFHCVEPGWFRVCFANMDDETLEVALKRIHAFVGEQKERETLSTKTKDMPSKTKCWKKNLRLSFSSRIFEEGIGSPIAMSPHSPLVRART

SEQ ID NO: 8548 - protein, 548 aa, Escherichia coli
MAAKDVKFGNDARVKMLRGVNVLADAVKVTLGPKGRNVVLDKSFGAPTITKDGVSVAREIELEDKFENMGAQMVKEVASKANDAAGDGTTTATVLAQAIITEGLKAVAAGMNPMDLKRGIDKAVTAAVEELKALSVPCSDSKAIAQVGTISANSDETVGKLIAEAMDKVGKEGVITVEDGTGLQDELDVVEGRQFDRGYLSPYFINKPETGAVELESPFILLADKKISNIREMLPVLEAVAKAGKPLLIIAEDVEGEALATLVVNTMRGIVKVAAVKAPGFGDRRKAMLQDIATLTGGTVISEEIGMELEKATLEDLGQAKRVVINKDTTTIIDGVGEEAAIQGRVAQIRQQIEEATSDYDREKLQERVAKLAGGVAVIKVGAATEVEMKEKKARVEDALHATRAAVEEGVVAGGGVALIRVASKLADLRGQNEDQNVGIKVALRAMEAPLRQIVLNCGEEPSVVANTVKGGDGNYGYNAATEEYGNMIDMGILDPTKVTRSALQYAASVAGLMITTECMVTDLPKNDAADLGAAGGMGGMGGIGGVM

SEQ ID NO: 8549 - protein, 117 aa, Saccharomyces cerevisiae
MSSSTPFDPYALSEHDEERPQNVQSKSRTAELQAEIDDTVGIMRDNINKVAERGERLTSIEDKADNLAVSAQGFKRGANRVRKAMWYKDLKMKMCLALVIIILLVVIIVPIAVHFSR

SEQ ID NO: 8550 - protein, 115 aa, Zea mays
  misc_feature (81)..(81): Xaa can be any naturally occurring amino acid
  misc_feature (100)..(100): Xaa can be any naturally occurring amino acid
HASSNTLDGLNGFDGTDTHYFHSGPRGHHWMWDSRLFNYGNWEVLRFLLSNARWWLEEYKFDGFRFDGVTSMMYTHHGLQXTFTGNFNEYFGFATDVDAXVYLMLVNDLIHGLYP

SEQ ID NO: 8551 - protein, 548 aa, Escherichia coli
MAAKDVKFGNDARVKMLRGVNVLADAVKVTLGPKGRNVVLDKSFGAPTITKDGVSVAREIELEDKFENMGAQMVKEVASKANDAAGDGTTTATVLAQAIITEGLKAVAAGMNPMDLKRGIDKAVTAAVEELKALSVPCSDSKAIAQVGTISANSDETVGKLIAEAMDKVGKEGVITVEDGTGLQDELDVVEGMQFDRGYLSPYFINKPETGAVELESPFILLADKKISNIREMLPVLEAVAKAGKPLLIIAEDVEGEALATLVVNTMRGIVKVAAVKAPGFGDRRKAMLQDIATLTGGTVISEEIGMELEKATLEDLGQAKRVVINKDTTTIIDGVGEEAAIQGRVAQIRQQIEEATSDYDREKLQERVAKLAGGVAVIKVGAATEVEMKEKKARVEDALHATRAAVEEGVVAGGGVALIRVASKLADLRGQNEDQNVGTKVALRAMEAPLRQIVLNCGEEPSVVANTVKGGDGNYGYNAATEEYGNMIDMGILDPTKVTRSALQYAASVAGLMITTECMVTDLPKNDAADLGAAGGMGGMGGMGGMM

SEQ ID NO: 8552 - protein, 479 aa, Gibberella zeae PH-1
MSSLATKQQSLKIFEKLKTKPANKICFDCGQKNPTWTSVPFGIYLCLDCSSNHRNLGVHISFVRSTNLDQWQWDQLRVMKVGGNESATKFFQQNGGTAALNSKDPKTKYQSNAATKYKDELKRRAARDAQDYPTEVIITDAIDDGSATPAGEPDDDFFSSWDKPAIKRPTPPVSRTGTPPVVGRTPSPFLNSGNGKDIARTASPLSRTSTGENKPASRITTSAALRKTPASTGPRKANVLGAKKTTKLGAKKVTADIIDFDEAERKAKEEADRIAKLGYDPDAEEDPATKNSGSAAAIISPTPVAPSRGSASSHTRQKSDAEVERLGMGMNRLGFGQVGGPKAAASSAPKRNAGGFGSVGPVRAQDVDDSERYAREKFGTQKGISSDEFFGKGAFDPSQQSEAKTRLQGFEGATAISSNAYFGRPEDEPEEEYGDLESAAKDFVRKFGITAGDDLENLTQMAGEVSTRLQGAIRSYLGN

SEQ ID NO: 8553 - protein, 424 aa, Brassica oleracea
MATTPMCTEWQFSGNEAAKEAAAAALGAYTSKLMALCDPNGKPILPPSNKAVETSNSAEKAVVKFILSGTGNAYAPSIGLPLAKSAVAEYLNRDLPKKLTAADVFMTVGCKRAIDLAVDILAKPKANVLLPRPGFPWDVVRCIYKKLEVRYYDFIPEQNFEIDFESVKKVTDKNTFAIFIINPHNPNGNTYSEAHLKQLAELAKELSIMVVSDEVFRWTVFGNNPFVPMGKFSSIVPVVTLGSLSKGWNVPGWRTGWLALHDLDGVFRNTKILQAANEFLQINAKPPTVIQAAMPDILERTPKHFFHERGSFLKHKVDIGYSKVKHIPGLTCYMKPEACTFLWTKLDISCFADIEDDQDFCRKLAMEENLVVLPGIAFRQKNWLRHSIDMETQTVEDAFERLKSFCERHSAERGASLKNVNGVN

SEQ ID NO: 8554 - protein, 484 aa, Thermobifida fusca YX
MTSQSTTPLGNLEETPKPDIRFPSDFVWGVATASFQIEGSTTADGRGPSIWDTFCATPGKVENGDTGDPACDHYNRYRDDVALMRELGVGAYRFSIAWPRIQPEGKGTPVEAGLDFYDRLVDCLLEAGIEPWPTLYHWDLPQALEDAGGWPNRDTAKRFADYAEIVYRRLGDRITNWNTLNEPWCSAFLGYASGVHAPGRQEPAAALAAAHHLMLGHGLAAAVMRDLAGQAGRSVRIGVAHNQTTVRPYTDSEADRDAARRIDALRNRIFTEPLVKGRYPEDLIEDVAAVTDYSFVQDGDLKTISANLDMMGVNFYNPSWVSGNRENGGSDRLPDEGYSPSVGSEHVVEVDPGLPVTAMGWPIDPTGLYDTLTRLANDYPGLPLYITENGAAFEDKVVDGAVHDTERIAYLDSHLRAAHAAIEAGVPLKGYFAWSFMDNFEWALGYGKRFGIVHVDYESQTRTVKDSGWWYSRVMRNGGIFGQE

SEQ ID NO: 8555 - protein, 239 aa, Eriobotrya japonica
MGGGRVQLKRIENKINRQVTFSKRRTGLLKKAHEISVLCDAQVAVVVFSNKGKLFEYATDSCMEQILERYERYSYAERQLVEPEFESQGNWTFEYCRLKAKVEVLQRNHRHYLGEDLDSLTLKEIQNLEQQLDTALKQIRLRKNQLMHESISELQRKRKAIQEENNLLAKKIKEKEKAAAQPQVQDWEQQNIGLDLLPQPLPCLNNGGTQQDEFLQVRRNQLDLTLEPLYSCHLGCFAA

SEQ ID NO: 8556 - protein, 82 aa, Glycine max
CVLKCEYAVRGEVVTLAQNLQKDLQANPGSHPFDEILYCNIGNPQSLGQQPITFFREVLALCDHPAILDKSETQGLFSSVAI

SEQ ID NO: 8557 - protein, 633 aa, Phalaenopsis hybrid cultivar
MEGCDCIEPQWPADELLVKYQYISDFFIALAYFSIPLELIYFVKKSSFFPYRWVLIQFGAFIVLCGATHLINLWTFTMHSRTLAIVMTVAKVSTAVVSCATALMLVHIIPDLLSVKTRELFLRNKAEELDKEMGLIRTQEETGRHVRMLTHEIRSTLDRHTILRTTLVELGRTLDLAECALWMPSRTGLNLQLSHTLNNQIPVGSVVSINLPVVNQVFNSSRAVRIPHTCQLARFQPHTGRYVPPEVVAVRVPLLHLSNFQINDWPELSAKNFAVMVLMLPSDSARKWHVYELELVEVVADQVAVALSHAAILEESMRARDQLMDQNVALDLARREAEMAIRARNDFLAVMNHEMRTPMHAIIALSSLLLETELTPEQRLMVETILKSSNLLATLINDVLDLSKLEDGSFELEVTVFNLHTVFREVVNLIKPIAAVKKLSLIVSLSPDLPSCAVGDEKRLMQTMLNVVGNAVKFTKEGSISITASIAKPDSLRDPRDPEFYPIPSDGHFYLRVQIKDTGCGISPQELPHLFTKFAHAQNGSDKGYNGSGLGLAICKRFVNLMKGHIWLESEVLGKGCTTIFIVKVGISEDPAHRYQHKLLPPIRAGQSEADAFGSKRTPTDLIPLKNRYQRSL

SEQ ID NO: 8558 - protein, 329 aa, Pisum sativum
MTITRFVLNEQSKRPESRGDFTILLSHIVLGCKFVCSAVNKAGLAKLIGLAGETNIQGEEQKKLDVLSNDVFIKALISSGRTCILVSEEDEEATFVEPSLRGKYCVVFDPLDGSSNIDCGVSIGTIFGIYMVKDNHAPTLDDVLQPGKNMLAAGYCMYGSSCTLVLSTGSGVNGFTLDPSLGEFILTHPDIKIPKKGKIYSVNEGNAKNWDGPTTKYVEKCKFPTDGSSPKSLRYIGSMVADVHRTLLYGGIFLYPADKKSPNGKLRVLYEVFPMSFLMEQAGGQSFTGKQRALDLIPTKIHERSPIFLGSYDDVEEIKALYAAEQKNA

SEQ ID NO: 8559 - protein, 338 aa, Vibrio vulnificus YJ016
MSGMRTLGEFIVEKQADFPHASGDLSSLLSSIRLAAKIVNREINKAGLVDITGAAGVENIQGEVQQKLDVYANEKFKSALEARDQVCGVASEEEDEAVAFNKELNKNAKYVVLMDPLDGSSNIDVNVSVGTIFSIYRRVSPIGTPPTQEDFLQPGHKQVAAGYIIYGSSTMLVYTTGNGVNGFTYDPSLGTFCLSHENMMIPQNGNIYSINEGNYIRFPMGVKKYIKYCQENVPEDGRPYTSRYIGSLVADFHRNLLKGGIYLYPSTQSHPQGKLRLLYECNPMAFLIEQAGGLASDGVNRILDLKPTELHQRVPFFVGSTNMVKKVEEFLEVYRDEA

SEQ ID NO: 8560 - protein, 492 aa, Gossypium hirsutum
MDPYKHRPSSAFNSPFWTTNSGAPVWNNNSSLTVGPRGQYLLEDYHLVEKLANFDRERIPERVVHARGASAKGFFEVTHDISHLTCADFLRAPGVQTPVIVRFSTVIHERGSPETLRDPRGFAVKFYTREGNFDLVGNNFPVFFIRDGMKFPDMVHALKPNPKSHIQENWRILDFFSHHPESLHMFTFLFDDLGVPQDYRHMEGSGVNTYTLINKAGKAHYVKFHWKPTCGVKCLLEDEAIKVGGANHSHATQDLYDSIAAGNYPEWKLFIQTIDPDHEDKFDFDPLDVTKTWPEDILPLQPVGRLVLNKNIDNFFAENEQLAFCPAIVVPGIYYSDDKLLQTRIFSYSDTQRHRLGPNYLQLPANAPKCAHHNNHHEGFMNFMHRDEEINYFPSRYDPVRHAEMFPIPPAVCTGRREKCIIEKENNFKQPGERYRSWAADRQERFICRWVDALSDPRVTHEIRSIWISYWSQADKSVGQKLASLLNVRPSI

SEQ ID NO: 8561 - protein, 705 aa, Rhodopseudomonas palustris CGA009
MAKSAKPTKNRTATIHDQKMSRGEGGELHQTAEDLGTEVMTTAQGGPISDDQNTLKIGPRGPALIEDFHFREKIFHFDHERIPERVVHARGYGAHGFFETTHSLAKFSRADLFQRVGERTPAFVRFSTVAGSKGSVDLARDVRGFAVKIYTKEGNWDLVGNNIPVFFIQDAIKFPDLIHSVKEEPDRAFPQAQSAHDNFWDFISLTPESMHMVMWVMSDRAIPRSFRFMEGFGVHTFRLVNADGESTFVKFHWKPKLGMQSVLWNEAVKINGADPDFHRRDLWTAISTGNFPEWELRVQLFDQEFADKFDFDILDATKIIPEEIIPPVPVGRLVLDRMPDNFFAETEQVAFMTQNVPPGIDFSNDPLLQGRNFSYLDTQLKRLGSPNFAHLPINAPKCPFAHFQQDGHMAMHNPVGRANYQPNSHGLGPRESPQRGFVPFPEAEEGAKAKFRAESFADHYSQARQFYLSQTRTEQHHIVSALTFELSKVEISVIRERVLSHLLLIDETLATNVANRLGIKAMPKPADAAVPTRQDLPPSPALSIIENGPERFGGRKLGILITDGTDAALLKSLQKAVEKAGATFELIAPRVGGVIASDGSEIAAHQMIDGGPSVLYDAVALLPGDDEIDDLLQESTARDFVADAFAHCKFIGYVAAARPLFAKAGIGDDLDEGCIELAARKDAGAFVDQLGKLRVWARESVVKMR

SEQ ID NO: 8562 - protein, 478 aa, Glycine max
MAASVSTVGAVNGAPLSLNSSGAGASVPSSAFFGTSLKKVIASRVPNVKISSGSFKIVAAEKEIDEKQQTDKDRWKGLAYDVSDDQQDITRGKGLVDSLFQAPQDTGTHYAIMSSYEYLSTGLKQYNLDNNMDGFYIAPAFMDKLVVHISKNFMTLPNIKVPLILGIWGGKGQGKSFQCELVFAKMGINPIMMSAGELESGNAGEPAKLIRQRYREAADMIKKGKMCALFINDLDAGAGRLGGTTQYTVNNQMVNATLMNIADNPTNVQLPGMYNKEENPRVPIIVTGNDFSTLYAPLIRDGRMEKFYWAPTRDDRVGVCNGIFRTDNVPKDDIVKLVDTFPGQSIDFFGALRARVYDDEVRKWISVVGVDFIGKKLVNSKEGPPTFDQPKMTLSKLLEYGNMLVQEQENVKRVQLADKYLKEAALGDANQDSINRGTFYGKAAQQVNIPVPEGCTDPNASNFDPTARSDDGTCLYTP

SEQ ID NO: 8563 - protein, 115 aa, Zea mays
HASSNTLDGLNGFDGTHTHYFHSGPRGHHWMWDSRLFNYGNWEGLRFLLSNARWGLEEYKFDGFRFDGGTSMMYTHHGLQVTFTGNFNEYFGFATDVDAVVYLMLVNDLIHGLYP

SEQ ID NO: 8564 - protein, 303 aa, Arabidopsis thaliana
MSISQFPPPASPSPASSSRSLASSSPSPGSFSSSMRLWRPAAQRNLRNQWSNLSNCRQQWIVACSAGRSHATLLVNSYLSQKYMPMMELGVLSDMFDIDKKALKKLFTQQSSYRIKLLSSYKEMVAVVVEMVNASRSLRCYTKLSTGSLIQFSGTKEDSNDAGDCGGIPFGTCHVEMIPEKMAEELVEMFKREVMLKRLLIMELISLSTEVPQPINNSWSDELYHGEFDHLTKCSLYSMEVAKPVLPRVKDYNIGSSSISHTNQPTAEILQIYLTTWLAEVNIDTHRVDEILALVGEEIRVTF

SEQ ID NO: 8565 - protein, 548 aa, Escherichia coli
MAAKDVKFGNDARVKMLRGVNVLADAVKVTLGPKGRNVVLDKSFGAPTITKDGVSVAREIELEDKFENMGAQMVKEVASKANDAAGDGTTTATVLAQAIITEGLKAVAAGMNPMDLKRGIDKAVTAAVEELKALSVPCSDSKAIAQVGTISANSDETVGKLIAEAMDKVGKEGVITVEDGTGLQDELDVVEGMQFDRGYLSPYFINKPETGAVELESPFILLADKKISNIREMLPVLEAVAKAGKPLLIIAEDVEGEALATLVVNTMRGIVKVAAVKAPGFGDRRKAMLQDIATLTGGTVISEEIGMELEKATLEDLGQAKRVVINEDTTTIIDGVGEEAAIQGRVAQIRQQIEEATSDYDREKLQERVAKLAGGVAVIKVGAATEVEMKEKKARVEDALHATRAAVEEGVVAGGGVALIRVASKLADLRGQNEDQNVGIKVALRAMEAPLRQIVLNCGEEPSVVANTVKGGDGNYGYNAATEEYGNMIDMGILDPTKVTRSALQYAASVAGLMITTECMVTDLPKNDAADLGAAGGMGGMGGMGGMM

SEQ ID NO: 8566 - protein, 115 aa, Zea mays
  misc_feature (45)..(45): Xaa can be any naturally occurring amino acid
  misc_feature (55)..(55): Xaa can be any naturally occurring amino acid
  misc_feature (64)..(64): Xaa can be any naturally occurring amino acid
  misc_feature (74)..(74): Xaa can be any naturally occurring amino acid
  misc_feature (76)..(76): Xaa can be any naturally occurring amino acid
  misc_feature (100)..(100): Xaa can be any naturally occurring amino acid
  misc_feature (106)..(106): Xaa can be any naturally occurring amino acid
HASSNTLDGLNGFDGTDTHYFHSGPRGHHWMWDSRLFNYGNWEVXRFLLSNARWXLEEYKFDGXRFDGVTSMMXTXHGLQVTFTGNFNEYFGFATDVDAXVYLMLXNDLIHGLYP

SEQ ID NO: 8567 - protein, 457 aa, Geobacter metallireducens GS-15
MVQTRTKITLGLMAVIACLAFGGATLWRLAATAPDREGVASLKLLAEVLRQVEENYVERVDRKKLLEGAVNGMLAALDPHSAYLPPEPFSEMKVEISGSFGGLGIEIALKEGKLTVISPIEDTPAWRAGIKAGDHIWKIDGTPTRDLTIVQAVKKMRGERGTKVTLTILRNGETEPREFPLVRDIIQTKSLKARSLEPGYGYVRISHFQERTGEDFANALRNLRAENGGTLKGLVLDLRNNPGGLLEVAVAVAGRFVGERLDNGLIVYTEGREEFAKRRFSATVGEKEPPYPLVVLINSGSASASEIVAGALQDYGRAVIMGTPSFGKGSVQTVIPMKDGAGLKLTTALYYTPKGRSIQARGIIPDVIVENAELKSVTKDRREDFHEKDLDNHLGGGKDAVPAKGPIEKNEESGKKGQPARHAVGPEDDAKKDFQLARALDLLKSWEVLQKVAGGIK

SEQ ID NO: 8568 - protein, 439 aa, Triticum aestivum
MSTTKVKRRVGKYELGRTIGEGTFAKVRFARNTETGDPVAIKILDKEKLLKHKMVEQIKREIATMKLIKHPNVVRIHEVMGSKTKIYIVLEYVTGGELFDTIVNHGRMREDEARRYFQQLINAVDYCHSRGVYHRDLKPENLLLDSCGNLKVSDFGLSALSQQLKDDGLLHTTCGTPNYVAPEVLEDQGYDGAMADLWSCGVILFVLLAGYLPFEDSNLMALYKKISDAEFTFPPWTSFPAKRLLTRILDPNPMTRITVQEMLEDEWFKKGYKRAEFDEKYDTTLDDVDAVFNDSEEHHVTEKKEEEPVALNAFELISMSAGLNLGNLFDSEQEFKRETRFTSKSSPKEILRKIEEAAKPLGFDIQKKNYKLRLEKVKAGRKGNLNVATEILRVGPSLHMVEVRKAKGDTLEFHKFYKNLSNTLKDVVWKSDDLQIQPS

SEQ ID NO: 8569 - protein, 196 aa, Triticum aestivum
  misc_feature (148)..(148): Xaa can be any naturally occurring amino acid
  misc_feature (182)..(182): Xaa can be any naturally occurring amino acid
  misc_feature (185)..(185): Xaa can be any naturally occurring amino acid
MSVPEAGQSAGRDEQEMDDYEQHQTRVLMALMQGLCAARYRKADNTPCLVDQGLYLGSVGAALNNEALKSLNITHILVVARSLNPAFPAEFTYKKIEVLDSPDTDLGKHFGECFTFIDEGICTGGNVLVHCFAGRSRSVTVVLAYLMXKHQMSLQSAMSLVRSKRPQIAPNAGFISQLVNFXKSXQVEQGQRTLQN

SEQ ID NO: 8570 - protein, 548 aa, Escherichia coli
MAAKDVKFGNDARVKMLRGVNVLADAVKVTLGPKGRNVVLDKSFGAPTITKDGVSVAREIELEDKFENMGAQMVKEVASKANDAAGDGTTTATVLAQAIITEGLKAVAAGMNPMDLKRGIDKAVTAAVEELKALSVPCSDSKAIAQVGTISANSDETVGKLIAEAMDKVGKEGVITVEDGTGLQDELDVVEGMQFDRGYLSPYFINKPETGAVELESPFILLADKKISNIREMLPVLEAVAKAGKPLLIIAEDVEGEALATLVVNTMRGIVKVAAVKAPGFGDRRKAMLQDIATLTGGTVISEEIGMELEKATLEDLGQAKRVVINKDTTTIIDGVGEEAAIQGRVAQIRQQIEEATSDYDRDKLQERVAKLAGGVAVIKVGAATEVEMKEKKARVEDALHATRAAVEEGVVAGGGVALIRVASKLADLRGQNEDQNVGIKVALRAMEAPLRQIVLNCGEEPSVVANTVKGGDGNYGYNAATEEYGNMIDMGILDPTKVTRSALQYAASVAGLMITTECMVTDLPKNDAADLGAAGGMGGMGGMGGMM

SEQ ID NO: 8571 - protein, 550 aa, Yersinia enterocolitica
MAAKDVKFGNDARIKMLRGVNILADAVKVTLGPKGRNVVLDKSFGSPTITKDGVSVAREIELEDKFENMGAQMVKEVASKANDAAGDGTTTATVLAQSIITEGLKAVAAGMNPMDLKRGIDKAVIAAVEELKKLYVPCSDSKAIAQVGTISANSDSTVGELIAQAMEKVGKEGVITVEEGPGLQDELDVVEGMQFDRGYLSPYFINKPETGSIELESPFILLADKKISNIREMLPVLEAVAKAGKPLLIIAEDVEGEALATLVVNTMRGIVKVAAVKAPGFGDRRKAMLQDIATLTVGTVISEEIGLELEKTTLEDLGQAKRVVINKDTTIIIDGVGDEAAIQGRVTQIRQQIEEATSDYDKEKLQERVAKLAGGVAVIKVGAATEVEMKEKKARVEDALHATRAAVEEGVVAGGGVALIRAASAITAAGLKGDNEDQNVGIKVALRAMESPLRQIVVNAGEEASVIANNVKAGSGSYGYNAYSEEYGDMIAMGILDPTKVTRSALQYAASIAGLMITTECMITDLPRDDKGADMGAGGMGGMGGMGGMM

SEQ ID NO: 8572 - protein, 115 aa, Zea mays
  misc_feature (55)..(55): Xaa can be any naturally occurring amino acid
  misc_feature (64)..(64): Xaa can be any naturally occurring amino acid
  misc_feature (83)..(83): Xaa can be any naturally occurring amino acid
  misc_feature (106)..(106): Xaa can be any naturally occurring amino acid
HASSNTLDGLNGFDGTDTHYFHSGPRGHHWMWDSRLFNYGNWEVLRFLLSNARWXLEEYKFDGXRFDGVTSMMYTHHGLQVTXTGNFNEYFGFATDVDAVVYLMLXNDLIHGLYP

SEQ ID NO: 8573 - protein, 279 aa, Gluconobacter oxydans 621H
MSSQVPSAEAQTVISFHDGHTMPQIGLGVWETPPDETAEVVKEAVKLGYRSVDTARLYKNEEGVGKGLEDHPEIFLTTKLWNDEQGYDSTLRAYEESARLLRRPVLDLYLIHWPMPAQGQYVETWKALVELKKSGRVKSIGVSNFESEHLERIMDATGVVPVVNQIELHPDFQQRALREFHEKHNIRTESWRPLGKGRVLSDERIGKIAEKHSRTPAQVVIRWHLQNGLIVIPKSVNPKRLAENLDVFGFVLDADDMQAIEQMDRKDGRMGADPNTAKF

SEQ ID NO: 8574 - protein, 548 aa, Escherichia coli
MAAKDVKFGNDARVKMLRGVNVLADAVKVTLGPKGRNVVLDKSFGAPTITKDGVSVAREIELEDKFENMGAQMVKEVASKANDAAGDGTTTATVLAQAIITEGLKAVAAGMNPMDLKRGIDKAVTAAVEELKALSVPCSDSKAIAQVGTISANSDETVGKLIAEAMDKVGKEGVITVEDGTGLQDELDVVEGMQFDRGYLSPYFINKPETGAVELESPFILLADKKISNIREMLPVLEAVAKAGKPLLIIAEDVEGEALATLVVNTMRGIVKVAAVKAPGFGDRRKAMLQDIATLTGGTVISEEIGTELEKATLEDLGQAKRVVINKDTTTIIDGVGEEAAIQGRVAQIRQQIEEATSDYDREKLQERVAKLAGGVAVIKVGAATEVEMKEKKARVEDALHATRAAVEEGVVAGGGVALIRVASKLADLRGQNEDQNVGIKVALRAMEAPLRQIVLNCGEEPSVVANTVKGGDGNYGYNAATEEYGNMIDMGILDPTKVTRSALQYAASVAGLMITTECMVTDLPKNDAADLGAAGGMGGMGGMGGMM

SEQ ID NO: 8575 - protein, 455 aa, Solanum tuberosum
KAYDSDPFHPLKNPNGVIQMGLAENQLCLDLIEDWIKRNPKASICSNEGIKSFRAIANFQDYHGLPEFRRAIAKFMEKTRGGRVRFDPERVVMAGGATGANETIIFCLADPGDAFLVPSPYYPAFNRDLRWRTGVQLLPIHCESSNNFKITSKAVKEAYENAQKSNIKVRGLILTNPSNPLGTTLDKYTLKSLLSFTNQHNIHLVCDEIYAATVFDTPQFVSIAEVLDEKEMTYCNKDLVHIVYSLSKDMGLPGFRIGIVYSFNDDVVNCARKMSSFGLVSTQTQYFLAAMLSDEKFVDNFLTESAIRLAKRHKHFTNGLEEVGIKCLKNNAGLFCWMDLRPLLRESTFDSEMSLWRVIINDVKLNVSPGSSFECQEPGWFRVCFANMDDGTVDIALARIRRFVRVEKSGDESSAMEKKQQWKKNNLRLSFSKRMYDESVLSPLSSPIPPSPLVR

SEQ ID NO: 8576 - protein, 181 aa, Brassica napus
GGYFEMTNFPPRVVEEIYKVASIALSPNVSAQIFMGLMVSPPKPGDISYDQFARESKGILESLRRRAKIMTDGFNSCKNVVCNFTEGAMYSFPQIKLPPGALQAAKQAGKVPDVFYCLKLLEATGISTVPGSGFGQKEGVFHLRTTILPAEEEMPEIMDSFKKFNDEFMTQYENSFGYSRM

SEQ ID NO: 8577 - protein, 856 aa, Cytophaga hutchinsonii
MNLSIRTLNIIFSISLLLLASAFIYSYLNIQGLRSANHWVNHTNKVIISLESIYSDIKNAESGVRGYALTKDASYLEQQDQSRTNIKNQLILLDSLLADNPEQHIYIDTLQKTVNDRFFLFNGLINLTNNNADQAEVLPLMQKGKASTEHIYNLVKKMKNNEGILLLQRNEKAEALDKTTPITIVFSGIFGFMVLVISYYFILADLKQRRKIANEVKIKNTLLEYAQQITQMGTFEYNVFTNTLFWSNEMYNIFELDRSVIPEINFIDSLIKEESEITHNRRKKNFQPGASYSDELKIRTVNGNEKVLISNGYVVNEENGLVVHGAIIDITPLKKAELTAREQQELMRVAKEKAESASQFKTRFLSNMSHEIRTPINAILGFTAILSKQELTEQQKKLLKNISISGELLLKLIGNILDISKIEEGKVIIESKSFHLKESIRSVLSPFQHSASEKGLQFHLIIDKSIPDYLLGDFPRISQVLVNLIGNALKFTSHGNITVSVLLTKKQDGLSFVEFVINDTGIGIQANKQDEIFESFTQANESISVKYGGSGLGLSIVQEVVHLMGGNIQVQSPAHYNERGKGYGSKFFFTLPFKLGEKGADPQAKKTAVQPFPRVLHILVADDNEMNRTLATYTLQSLGCTFEIVENGLQAIQKAAANTYDIILMDMQMPVCDGLQATRQIRLNKNTTPIVGLTANVFQEDINRCLDAGMDGHLGKPYTEEDLYHIIDKWVFKNEKNIAASVPSFSNYEFIEKLSKNDPVIFREMLEMFLNQNAQLLKIIHTAINAEDLETLSFNVHQYKSCARMLNIEKQISLIKQIEEKIEARVSLETIRTDIMQLIETGALVSKEIEQKLLIV

SEQ ID NO: 8578 - protein, 551 aa, Ehrlichia ruminantium
MANMVVTGEQLDKSIREVVRILEDAVGCTAGPKGLTVAISKPYGAPEVTKDGYKVMKSIKPEDPLALAIANIIAQSASQCNDKVGDGTTTCSILTAKVIEEVSKVKAAGADIICVREGVLKAKEAVLEALKCMKREVLSEEEIAQVATISANGDKNIGTKIAQCVKEVGKDGVITVEESKGFKELDVEKTDGMQFDRGYLSPYFVTNSEKMLVEFENPYILLTEKKLNIIQPLLPILENIARSGRPLLIIAEDVEGEALSTLVLNKLRGGLHVAAVKAPGFGDRRKDMLGDIAILTGAKHVINDELAIKMEDLTLCDLGTAKNIRITKDTTTIIGSVDNSCAHVQSRICQIRMQIDNSTSDYDKEKLQERLAKLSGGVAVLKVGGSSEVEVKERKDRVEDALHATRAAVEEGVVPGGGAALLYTLSALDNLKSKNDDEQLGINIVKRALQAPIKRIIKNAGSENAPCVIAHLLKQNDKELIFNVDVTNFANAFTSGVIDPLKVVRIAFDFAVSLAAVFMTLNAIVVDIPSKDDNSAAGGAGMGGMGGMGGF

SEQ ID NO: 8579 - protein, 459 aa, Lactobacillus johnsonii NCC 533
MNKHKMPKDFFWGNSVSSMQTEGAWDEDGKGLSVYDVRPATENTTDWHTAIDEYHRYDEDLDLMKEMNMNMYRIQISWSRVCPEGDGDFNPKGIEFYDKLVDAMLDRGIEPMICLYHFDMPLHLAKEYNGFMSRHVVDAFVRFGKKMIDHFSDRVKYWIVFNEHNLYFQDEVFNISGYEKGDKTLDDMYTIFHHTMISHIRLANYIHEKYDDVKIGGMLAFQQIYPETSKSTDVWAAKQIQEFLNFNIYDADTGRGYSPEVLQYAKNHNINLDITKEDKEEMKKAKADFLAFSYYSSWTVSADKIPADVAPNRYMNYGGVENKYLKTNAWGWTIDPLGFRNAITTMYNHYKIPVFPIENGIGLKETWDSEHMIEDDERIAYHEEHIKAMKDAMFLDGAKVLGYLGWGLIDIPSSHADMEKRYGAVYVNRSNHDLKDLKRVPKKSFYWFQKVLKDNGDEI

SEQ ID NO: 8580 - protein, 128 aa, Arabidopsis thaliana
  misc_feature (106)..(106): Xaa can be any naturally occurring amino acid
MQKRAYFQRQWFYKFLRRTIAVHILMFWTILYLYGGLPYLTCGGGVGIFIGYHVTWLVNSACHIWGSRSWNTKDTSRNVWWLSLFTMGESWHNNHHAFESSARQGXEWWQIDITWYLIRLFEVLGIAT

SEQ ID NO: 8581 - protein, 446 aa, Arabidopsis thaliana
MAAAVSTVGAINRAPLSLNGSGSGAVSAPASTFLGKKVVTVSRFAQSNKKSNGSFKVLAVKEDKQTDGDRWRGLAYDTSDDQQDITRGKGMVDSVFQAPMGTGTHHAVLSSYEYVSQGLRQYNLDNMMDGFYIAPAFMDKLVVHITKNFLTLPNIKVPLILGIWGGKGQGKSFQCELVMAKMGINPIMMSAGELESGNAGEPAKLIRQRYREAADLIKKGKMCCLFINDLDAGAGRMGGTTQYTVNNQMVNATLMNIADNPTNVQLPGMYNKEENARVPIICTGNDFSTLYAPLIRDGRMEKFYWAPTREDRIGVCKGIFRTDKIKDEDIVTLVDQFPGQSIDFFGALRARVYDDEVRKFVESLGVEKIGKRLVNSREGPPVFEQPEMTYEKLMEYGNMLVMEQENVKRVQLAETYLSQAALGDANADAIGRGTFYGKTEEKEPSK

SEQ ID NO: 8582 - protein, 686 aa, Triticum aestivum
MLCLSSSLLPRPSAAADRPLPGIIAGGGGGKRLSVVPSVPFLLRWLWPRKAKSKSFVSVTARGNKIAATTGYGSDHLPIYDLDLKLAEFKDHFDYTRNRYIEQKHLIEKHEGSLEEFSKGYLKFGINTEHGASVYREWAPAAEEAQLVGDFNNWNGSGHKMAKDNFGVWSIRISHVNGKPAIPHNSKVKFRFRHHGVWVEQIPAWIRYATVTASESGAPYDGLHWDPPSSERYVFNHPRPPKPDVPRIYEAHVGVSGGKLEAGTYREFPDNVLPCLRATNYNTVQLMGIMEHSDSASFGYHVTNFFAVSSRSGTPEDLKYLIDKAHSLGLRVLMDVVHSHASNNVIDGLNGYDVGQSAHESYFYTGDKGYNKMWNGRMFNYANWEVLRFLLSNLRYWMDEFMFDGFRFVGVTSMLYNHNGINMSFNGNYKDYIGLDTNVDAFVYMMLANHLMHKLFPEAIVVAVDVSGMPVLCWPVDEGGLGFDYRQAMTIPDRWIDYLENKGDQQWSMSSVISQTLTNRRYPEKFIAYAERQNHSIIGSKTMAFLLMEWETYSGMSAMDPDSPTIDRAIALQKMIHFITMAFGGDSYLKFMGNEYMNAFVQAVDTPSDKCSFLSSSNQTASHMNEEEKGSALTKGYTHLRSGCFDPSLPSTSSCAFLGPSNQSPFSKPFIGFPGCIFCCGLFKGE

SEQ ID NO: 8583 - protein, 80 aa, Zea mays
  misc_feature (17)..(17): Xaa can be any naturally occurring amino acid
  misc_feature (23)..(23): Xaa can be any naturally occurring amino acid
  misc_feature (32)..(32): Xaa can be any naturally occurring amino acid
  misc_feature (45)..(46): Xaa can be any naturally occurring amino acid
  misc_feature (54)..(55): Xaa can be any naturally occurring amino acid
  misc_feature (62)..(62): Xaa can be any naturally occurring amino acid
  misc_feature (64)..(64): Xaa can be any naturally occurring amino acid
  misc_feature (67)..(67): Xaa can be any naturally occurring amino acid
  misc_feature (69)..(69): Xaa can be any naturally occurring amino acid
  misc_feature (76)..(76): Xaa can be any naturally occurring amino acid
  misc_feature (79)..(79): Xaa can be any naturally occurring amino acid
HASSNTLDGLNGFDGTXTHYFHXGPRGHHWMXDSRLFNYGNWEVXXFLLSNARXXLEEYKFXGXRFXGXTSMMYTXHGXQ

SEQ ID NO: 8584 - protein, 486 aa, Bacillus licheniformis ATCC 14580
MSDRAIPRSYRMMEGFGVHTFRFVNEEGKAHFVKFHWKPVLGVHSLVWDEAQTIAGKDPDYHRRDLWEAIERGDEVEYELGVQMIDEEDEFKFDFDILDPTKLWPEEIVPVKIIGKMTLNRNQDNVFAETEQAAFHPGHVVPGIDFTNDPLLQGRLFSYTDTQLIRLGGPNFHEIPINRPVCPFHNNQYDGYHRMTINKGPVAYHKNSLQNNDPAPASEEEGGYVHYEEKVEGKKIRQRSESFNDHYSQAKLFWNSMSPVEKEHIISAFRFEVGKVKSKDVRRQVVHMFNRVDGELAKQIAAGVGVEPPEKDEGSNVTFKSPALSQENTVKLPQTRTVAILAEQGFDDEDLSRVLKEFKKAGIIPDIVSSALGVIEGAGGTEIEVGNTLQTVDSVLYDAVYIPGGQESIERLKLHKAASDFVNEAFGHYKAVGAAGEGVDLLLSAAGAHAASQPGIITSRGDKNKDDFGKKLVEAISGHRHWDRQV

SEQ ID NO: 8585 - protein, 550 aa, Rickettsia typhi str. Wilmington
MTTKLIKHGSKAREQMLEGIDILADAVKVTLGPKGRNVLIEQSFGAPKITKDGVTVAKSIELKDKIRNAGAQLLKSAATKAAEVAGDGTTTATVLARALAREGNKLVAAGYNPMDLKRGMDLAVNAVVEEIKRSSKKINSQEEIAQVGTISSNGDKEIGEKIAKAMEEVGKEGVITVEEAKNFSFDVEVVKGMMFDRGYLSPYFVTNSEKMVAELENPFILLFEKKLSNLQPMLPILEAVVQSQRPLLIIAEDVEGEALATLVVNRLRGGLKVAAVKAPGFGDRRKAMMEDIAILTKGELITEDLGMKLENVNIKNLGTAKRVTISKENTVIVDGNGDKKNIEDRVLQIKSQIAETTSDYDKEKLQERLAKLSGGVAVLKVGGATEVEVKERKDRVEDALAATRAAVEEGVVAGGGVTLLHASQTLTKLKVENKDQQAGIEIVIEALKDPLKQIVKNAGENGGVVVGKLLEHNDKNYGFNAQDMQYVDMIKAGIIDPAKVVRTALQDAASVASLIITTETLIVDEPSDKEEPMPMRGGMGGMGGMGGMDF

SEQ ID NO: 8586 - protein, 494 aa, Arabidopsis thaliana
MVLATNSDSDEHLHSTFASRYVRAVVPRFKMPDHCMPKDAAYQVINDELMLDGNPRLNLASFVTTWMEPECDKLIMDSVNKNYVDMDEYPVTTELQNRCVNMIANFFHAPVGEDEAAIGCGTVGSSEAIMLAGLAFKRKWQHRRKAQGLPIDKPNIVTGANVQVCWEKFARYFEVELKEVKLSEDYYVMDPAKAVEMVDENTICVAAILGSTLTGEFEDVKQLNDLLAEKNAETGWETPIHVDAASGGFIAPFLYPDLEWDFRLPWVKSINVSGHKYGLVYAGVGWVVWRTKDDLPEELVFHINYLGADQPTFTLNFSKGSSQIIAQYYQFIRLGFEGYKNIMENCMDNARRLREGIEMTGKFNIVSKDIGVPLVAFSLKDSSKHTVFEIAESLRKFGWIIPAYTMPADAQHIAVLRVVIREDFSRGLADRLITHIIQVLKEIEGLPSRIAHLAAAAAVSGDDEEVKVKTAKMSLEDITKYWKRLVEHKRNIVC

SEQ ID NO: 8587 - protein, 205 aa, Bacillus licheniformis ATCC 14580
MNNNDGRRKVNGHSKDQQLEQYRSDNRGKKMTTNQGLRVSEDEHSLKAGVRGPTLMEDFHFREKMTHFDHERIPERVVHARGFGAHGYFQVYEPMTEYTKAKFLQDPSVKTPVFVRFSTVAGSRGSGDTVRDVRGFATKFYTEEGNYDLVGNNIPVFFIQDAIKFPDLVHAFKPEPNNEMPQASTAHDTFWDFVANNEETAHMIM

SEQ ID NO: 8588 - protein, 115 aa, Zea mays
  misc_feature (44)..(44): Xaa can be any naturally occurring amino acid
  misc_feature (55)..(55): Xaa can be any naturally occurring amino acid
  misc_feature (64)..(64): Xaa can be any naturally occurring amino acid
  misc_feature (81)..(81): Xaa can be any naturally occurring amino acid
  misc_feature (97)..(97): Xaa can be any naturally occurring amino acid
  misc_feature (100)..(100): Xaa can be any naturally occurring amino acid
  misc_feature (106)..(106): Xaa can be any naturally occurring amino acid
HASSNTLDGLNGFDGTDTHYFHSGPRGHHWMWDSRLFNYGNWEXLRFLLSNARWXLEEYKFDGXRFDGVTSMMYTHHGLQXTFTGNFNEYFGFATDXDAXVYLMLXNDLIHGLYP

SEQ ID NO: 8589 - protein, 441 aa, Arabidopsis thaliana
MAAAVSTVGAINRAPLSLNGSGSGAVSAPASTFLGKKVVTVSRFAQSNKKSNGSFKVLAVKEDKQTDGDRWRGLAYDTSDDQQDITRGKGMVDSVFQAPMGTGTHHAVLSSYEYVSQGLRQYNLDNMMDGFYIAPAFMDKLVVHITKNFLTLPNIKVPLILGIWGGKGQGKSFQCELVMAKMGINPIMMSAGELESGNAGEPAKLIRQRYREAADLIKKGKMCCLFINDLDAGAGRMGGTTQYTVNNQMVNATLMNIADNPTNVQLPGMYNKEENARVPIICTGNDFSTLYAPLIRDGRMEKFYWAPTREDRIGVCKGIFRTDKIKDEDIVTLVDQFPGQSIDFFGALRARVYDDEVRKFVESLGVEKIGKRLVNSREGPPVFEQPEMTYEKLMEYGNMLVMEQENVKRVQLAETYLSQAALGDANADAIGRGTFYGKTEV

SEQ ID NO: 8590 - protein, 115 aa, Zea mays
  misc_feature (32)..(32): Xaa can be any naturally occurring amino acid
  misc_feature (55)..(55): Xaa can be any naturally occurring amino acid
  misc_feature (64)..(64): Xaa can be any naturally occurring amino acid
  misc_feature (74)..(74): Xaa can be any naturally occurring amino acid
  misc_feature (76)..(76): Xaa can be any naturally occurring amino acid
HASSNTLDGLNGFDGTDTHYFHSGPRGHHWMXDSRLFNYGNWEVLRFLLSNARWXLEEYKFDGXRFDGVTSMMXTXHGLQVTFTGNFNEYFGFATDVDAVVYLMLVNDLIHGLYP

SEQ ID NO: 8591 - protein, 202 aa, Neurospora crassa
MSDSPQSNSKDVEQGAPSPGEEPQMNDPQDPHSSGLNQYEFEVKEQDRWLPIANVARIMKNALPENAKIAKEAKECMQECVSEFISFITSEASEKCQQEKRKTVNGEDILFAMTSLGFENYAEALKIYLSKYREQQNQTNRSENQQNRPSSQGYGAPQGQNQPGQGGFSSNDLGGQQESGDASGYNLYGAQTGHNGGGAEGY

SEQ ID NO: 8592 - protein, 115 aa, Zea mays
  misc_feature (45)..(45): Xaa can be any naturally occurring amino acid
  misc_feature (55)..(55): Xaa can be any naturally occurring amino acid
  misc_feature (64)..(64): Xaa can be any naturally occurring amino acid
  misc_feature (76)..(76): Xaa can be any naturally occurring amino acid
  misc_feature (93)..(93): Xaa can be any naturally occurring amino acid
  misc_feature (100)..(100): Xaa can be any naturally occurring amino acid
  misc_feature (106)..(106): Xaa can be any naturally occurring amino acid
HASSNTLDGLNGFDGTDTHYFHSGPRGHHWMWDSRLFNYGNWEVXRFLLSNARWXLEEYKFDGXRFDGVTSMMYTXHGLQVTFTGNFNEYFGXATDVDAXVYLMLXNDLIHGLYP

SEQ ID NO: 8593 - protein, 220 aa, Triticum aestivum
  misc_feature (176)..(176): Xaa can be any naturally occurring amino acid
  misc_feature (182)..(182): Xaa can be any naturally occurring amino acid
  misc_feature (210)..(210): Xaa can be any naturally occurring amino acid
MSPDDVSRKSPVPPPSPPPMDSWARGGRRSRPRGGGGSGSASSGGAAESEEEYLALSLLMLSRGVRGEVEDGGFGGVKGVGAAPTKAQGYECSVCGKVYASYQALGGHKTSHRKPPTPPAASAGGDEASGGAPVEAKVHQCSLCHRTFPSGQALGGHKRLHYEGGAAGDGTGKDKXGRQAKXAALLRDFDLNLPASGVAGDEAESPPPEXKRARLMLLTV

SEQ ID NO: 8594 - protein, 492 aa, Prunus persica
IRSTLDRHTILKTTLVELGRTLGLQECALWMPSRTGMNLQLSHTLNYQIQVGSTVPINLPIINEVFTSSRAIRIPYTCPLARIRPLVGRYVPPEVIALRVPLLNLSNFQINDWPDLSAKSYAIMVLILPTDSTRKWRDHELELVDVVADQVAVALSHAAILEESMRARDQLMEQNVALDLARREAEMAIHARNDFLAVMNHEMRTPMHAIIALSSLLLETELISEQRVMIETVLRSSNLLETLINDVLDLSRLEDGSLELDIRKFNLHGVFREVINLIQPITSVKKLSMSLILSPDLPLCAVGDENRLMQTILNVAGNAVKFTKEGYISIVASVAKPESSRDWRPPEFYPASTDGHFYLRVQVKDSGCGILPQDIPHLFTKFSQPRSGSNRINDGAGLGLAICRRFINTMGGHIWIESEGIDKGSIVAFIVKLGICDNPCDTTAAHQMAPQALPQPQPQPNYGSGDRIAHRPTVSFRDGGYTSSNPRYQRSI

SEQ ID NO: 8595 - protein, 130 aa, Brassica napus
LFTAGLEGYARPLVDRIDTRKVLSNRLYRPSTVSTPYRDHVKDLLTTSKNMSRTVIVDNNPFSFLLQPSNGIPCIAFSAGQPNDTQLLDVLLPLLKQLSEEEDVRPTLYDRFRMPEWFEKQGIPPSCRNP

SEQ ID NO: 8596 - protein, 477 aa, Lactococcus lactis
MLFLKGLTLMTKTLPKDFIFGGATAAYQAEGATHTDGKGPVAWDKYLEDNYWYTAEPASDFYHKYPVDLELAEEYGVNGIRISIAWSRIFPTGYGEVNEKGVEFYHKLFAECHKRHVEPFVTLHHFDTPEALHSNGDFLNRENIEHFIDYAAFCFEEFPEVNYWTTFNEIGPIGDGQYLVGKFPPGIKYDLAKVFQSHHNMMVSHARAVKLYKDKGYKGEIGVVHALPTKYPYDPENPADVRAAELEDIIHNKFILDATYLGHYSDKTMEGVNHILAENGGELDLRDEDFQALDAAKDLNDFLGINYYMSDWMQAFDGETEIIHNGKGEKGSSKYQIKGVGRRVAPDYVPRTDWDWIIYPEGLYDQIMRVKNDYPNYKKIYITENGLGYKDEFVDNTVYDDGRIDYVKQHLEVLSDAIADGANVKGYFIWSLMDVFSWSNGYEKRYGLFYVDFDTQERYPKKSAHWYKKLAETQVIE

SEQ ID NO: 8597 - protein, 489 aa, Persea americana
MEWPKSNDHSLLSKMATNDGHGEKSRIFDGWKAYDNDPYHPTTNPQGVIQMGLAENQLCFDLIEEWIKKNPKWSICTAEGASEFKDIALYQDYHGLPAFRSAIAKFMEKVRGGRAKFNPDRIVMSGGATGAHELVAFCLADPGDAFLVPTPYYPGFDRDLRWRTGVQLVPVVCYGKNDFKITRVALEEAYKKAQEDNIRVKGVIITNPSNPLGTVLDRETLRSIAKFVNEKNIHLVCDEIFAATVFNQPDFIGISEILEEEEEEDVQYNLDLFHVVYSLSKDLGFPGFRVGVVYSYNDDVMNCGRKMSSFGLVSTQTQYLIAGMLSDEVFVENFLAESHRRLAARHKFFTKDLDEVGIGCLNSNAGLYCWVDLRRLLKEATVAGEIALWRTIINEVKLNVSPGSSCHSSEPGWFRVCFANMDDETMKEAIKRIRKFVFENRLVGVASGKGPAVAAKSLGCASKLLRDLKIPYPRQCIMSPQSPLVQATT

SEQ ID NO: 8598 - protein, 424 aa, Avicennia marina
MDPYKYCPSSSFNTPHTTTNGGHPVYNDNSSLTVGTRGPVLLEDYQLIDKLAHFTRERIPERVVHARGATAKGFFEVTHDVSHLTCADFLRAPGVQTPLIVRFSTVIHERGSPETLRDPRGFAVKFYTREGNFDIVGNNFPVFFIRDAIKFPDVIHAFKPNPKSHIQESWRILDFCSHFPESLLTFAWFYDDVGIPQDYRHMEGFGVHSYTLINKAGKVNYVKFHWKPTCGVKCLMEDEAVRIGGTNHSHATQDLYDSIAAGNYPEWKLYFQIMDPDQEDRFDFDPLDTTKIWPEDIIPLIPVGRMVLNKNIDNFFAENEMLAFSPHMIVPGINFSNDKMLQTRIFAYGDTQRHRLGPNYLLLPVNAPKCAYHNNHYDGFMNFMHRDEEVDYFPSKYDPTRHAERHPIPNAVITGRRDRVRCFC

SEQ ID NO: 8599 - protein, 483 aa, Persea americana
MGFLRNQQLLSKMATGNGHGENSPFEGWKAYDSNPYHAIKNPDGVIQMGLAENQLSFDLVEDWIKENPESSICTLKGVSQFKDIALFQDYHGLSAFRNAVANFMGKVRGGKVKFNPDRIVMSGGATGAHETMAFCLANPGDAFLVPTPYYAGFDRDLRWRTGVQLIPVVCESSNGFKVTRDALEIAYKKAQEDNIKVKGVLITNPSNPLGTILDRETLKSIVSFINEQNIHLICDEIYAATVFSQPDFISISEILEEGITCNLDLIHVVYSLSKDLGFPGFRVGVIYSYNDDVVNCAREMSSLGLVSTQTQHLLSAMLSDEQFVDKLISESAERLASRHKMFTIELGKVGISCLKSNAGLFCWMDLRALLEKKTVEGEMALWRTIIEKVKLNVSPGSSFHCSEPGWFRVCFANMDDETMKVALDRIIDFVFKPNKKEIMAPKKVQQKWQANLHLRLSLCGRRHEEVTKTPCTMSPHSPLVRAT

SEQ ID NO: 8600 - protein, 289 aa, Salmonella enterica subsp. enterica serovar Paratyphi A str.
MEYSILSNNLKMPMVGFGVFKVTDKEECQQSVLSAIRSGYRLIDTAAVYGNEDAVGDAVREAIATGLCTREELFITSKLWVQDMANYDLAKAGIEASLKKSGLDYFDLYLLHQAMGDYFSAWRALEDAYKAGKLKAIGVSNFYAHVLANFCETVRITPMVNQVELHPYFAQPAALETMKHYNVQPEAWAPLGGGRHKPYENVMLQRIADAHQKTIAQVVLRWNVQRGVTVIPKSTRQERIEENFAIWDFSLTDNEMAQINALDLGYVGEAVKHFNPEFVRGCLGVKIHD

SEQ ID NO: 8601 - protein, 635 aa, Persea americana
MKGCDCIEPQWSSDDLLVKYQYLSDFFIAVAYFSIPLELVYFVQKSAFFPYRWVLTQFGAFIILCGATHFISLWTFTIHSKTVILVMAVAKVSTAVVSCATALMLVHIIPDLLSVKTREMFLKNKAEELDREMVIIRAQEETGRHVRMLTHEIRSTLNRDTILKTTLVELGRTLGLEECALWMPSHNGSSLQLSLTLRYPISVGATVSIQLPIVNKVFNSIHAVIIPHSCPLARIRPLSGKYVPPEVAAVRVPLLYLSNSQVNNWPELSANGYAVMVLMLPSDSARKWHVHELELVEVVADQVAVALSHASILEESMRAQDMLTEQNAALDLARQEAERAICARNDFLAVMNHEMRTPVHAIIALSSLLLETELTPEQRVMVETVLKSSNLLETLINDVLDLSRLEDGSLKLDIGIFNLHAVFREVINLIKPIAAMKKLSLSLMVAPNVPAFAVGDERRLMQIILNVAGNAVKFTKEGQVSVMACVEKQESLADPQALESYPASSDSHFHLRVQIKDSGCRVSPQDIPHLFTKFCICTRSGVNRSQDGSGLGLAICKRFVNLMEGHIWLQSEGLGKGCTATIVVKLGNNGNKTEESTQVVPRAHPKCGVENLSSRNPFLTISSRTQILKKCLLDF

SEQ ID NO: 8602 - protein, 59 aa, Brassica napus
EKFARSLRLSLREVKLSEGYYVMDPEQAVEMVDENTICVAAILGSTLNGEFEDVKLLNE

SEQ ID NO: 8603 - protein, 844 aa, Saccharomyces cerevisiae
MKPYLFDLKLKDTEKLDWKKGLSSYLKKSYGSSQWRTFYDEKATSELDHLRNNANGELAPSSLSEQNLKYYSFLEHLYFRLGSKGSRLKMDFTWYDAEYSSAQKGLKYTQHTLAFEKSCTLFNIAVIFTQIARENINEDYKNSIANLTKAFSCFEYLSENFLNSPSVDLQSENTRFLANICHAEAQELFVLKLLNDQISSKQYTLISKLSRATCNLFQKCHDFMKEIDDDVAIYGEPKWKTTVTCKLHFYKSLSAYYHGLHLEEENRVGEAIAFLDFSMQQLISSLPFKTWLVEFIDFDGFKETLEKKQKELIKDNDFIYHESVPAVVQVDSIKALDAIKSPTWEKILEPYMQDVANKYDSLYRGIIPLDVYEKESIYSEEKATLLRKQVEETETANLEYSSFIEFTNLPRLLSDLEKQFSDGNIFSNTDTQGQLMRDQIQTWCKFIQTNEFRDIEEQMNKIVFKRKQILEILSALPNDQKENVTKLKSSLVAASNSDEKLFACVKPHIVEINLLNDNGKIWKKFDEFNRNTPPQPSLLDIDDTKNDKILELLKQVKGHAEDLRTLKEERSRNLSELRDEINNDDITKLLIINKGKSDVELKDLFEVELEKFEPLSTRIEATIYKQSSMIDDIKAKLDEIFHLSNFKDKSSGEEKFLEDRKNFFDKLQEAVKSFSIFASDLPKGIEFYDSLFNMSRDLAERVRVAKQTEDSTANSPAPPLPPLDSKASVVGGPPLLPQKSAAFQSLSRQGLNLGDQFQNLKISAGSDLPQGPGIPPRTYEASPYAATPTMAAPPVPPKQSQEDMYDLRRRKAVENEERELQENPTSFYNRPSVFDENMYSKYSS

SEQ ID NO: 8604 - protein, 100 aa, Persea americana
PLLGGVRDVPDHNSAETEELARFAVQEHNKKANTRLEFSRVVKAKEQVVAGTMYYITLEVVEAGQKKIYEAKVWVKLWENFKELQEFKPVGDSSSTSSDA

SEQ ID NO: 8605 - protein, 457 aa, Glycine max
  misc_feature (275)..(275): Xaa can be any naturally occurring amino acid
  misc_feature (315)..(315): Xaa can be any naturally occurring amino acid
MFEGLCLKMEKRGNVLMEKYEFGKLLGQGNFAKVYHARDVRTGESVAVKVIDKEKILKIGLVDQTKREISIMRLVKHPNVLQLYEVLATKTKIYFIIEYAKGGELFNKIAKGRLTEDKARKYFQQLVSAVDFCHSRGVYHRDLKPENLLLDENGVLKVADFGLSALVESHRQKDMLHTICGTPAYVAPEVISRRGYDGTKADVWSCGVILFVLLAGHLPFYDLNLMSLYNKIGKADYKCPNWFPFEVRRLLAKILDPNPNTRISMAKVMENSWFXKGFKPKSGQVKREAVDVALVVSDQIFGLCENTSAAVVEAXASSVKPAHFNAFNIISLSAGLDLSGLFAGNVELDDTKFTFMSSASSIMSTMEDIARVLSMEIIKKDGGLLKLERSKEGRKGPLSIDAEIFEVAPSFHLVELKKSSGDTLEYQKILEDLRPALKDIVGVWQGEQHAVARLCTP

SEQ ID NO: 8606 - protein, 491 aa, Arabidopsis thaliana
MGSKLKLYPLLNHSSVFHPDSRYQSAPTMEEEQQQLRVLFAKYEMGRLLGKGTFGKVYYGKEITTGESVAIKIINKDQVKREGMMEQIKREISIMRLVRHPNIVELKEVMATKTKIFFIMEYVKGGELFSKIVKGKLKEDSARKYFQQLISAVDFCHSRGVSHRDLKPENLLVDENGDLKVSDFGLSALPEQILQDGLLHTQCGTPAYVAPEVLRKKGYDGAKGDIWSCGIILYVLLAGFLPFQDENLMKMYRKIFKSEFEYPPWFSPESKRLISKLLVVDPNKRISIPAIMRTPWFRKNINSPIEFKIDELEIQNVEDETPTTTATTATTATTTTTPVSPKFFNAFEFISSMSSGFDLSSLFESKRKLRSMFTSRWSASEIMGKLEGIGKEMNMKVKRTKDFKVKLFGKTEGRKGQIAVTAEVFEVAPEVAVVELCKSAGDTLEYNRLYEEHVRPALEEIVWSWHGDNHNNNIVKSNGNYVSDENSGSDC

SEQ ID NO: 8607 - protein, 255 aa, Brassica napus
GDIHGQYQDLLRLFEYGGYPPSANFLFLGDYVDRGKQSLETICLLLAYKIRYPSKIYLLRGNHEDAKINRIYGFYDECKRRFNVRLWKIFTDCFNCLPVAALIDDKILCMHGGLSPELDNLNQIREIQRPTEIPDSGLLCDLLWSDPDQKIEGWADSDRGISCTFGADKVAEFLDKNDLDLICRGHQVVEDGYEFFAKRRLVTIFSAPNYGGEFDNAGALLSVDESLVCSFEIMKPALASSSGHPLKKVPKMGKS

SEQ ID NO: 8608 - protein, 183 aa, Zea mays
  misc_feature (106)..(106): Xaa can be any naturally occurring amino acid
MRLTTENINQRVVAAKYAVRGELAVKSEEYRAKIAKGDTGDLPFNEIISANIGNPQQLDQKPITFFRQVASLLENPILLENEEALTKHFGYQTDVIERAKFLLSRXGSVGAYSASTGVPAIRESIAQFIERRDGFPADPEHIYLSAGASSGVNTLLNVICASPKTGILIPIPQYPLYTATLSL

SEQ ID NO: 8609 - protein, 472 aa, Bacillus licheniformis ATCC 14580
MKYKTLAQFPKDFLWGASTSAYQVEGAWDEDGKGPSVIDARESYPEGTTDFKVASDHYQRYKEDIALFAEMGFKAYRFSIAWTRIIPDGDGDINPKGIEFYSRLIDELLKYGIEPIVTMYHFDLPNALQKKGGWSDRATIDAFEKYAKVLFESYGDRVKYWLTINEQNMMILHGSALGTLDPNLENPKKELYQQNHHMLVAQAKAIKLCHEMLPEAKIGPAPNIALIYPASSKPEDVLAAFNYNAIRNWLYLDMAVFGRYNTTAWAYMKEKGCTPVIAEGDMDILRSAKPDFIAFNYYTSQTAEASRGDGSDTAARGGDQHLQTGEEGVYRGSSNPHLKKNAFGWEIDPVGFRSTLREIYDRYQLPLIVTENGLGAFDQLEDGDVVNDDYRIDYLKEHIKQIQLAITDGVDVFGYSPWSAIDLISTHQGCSKRYGFIYVNRDEFDLKDLRRIRKKSFYWYKNLIATNGETLD

SEQ ID NO: 8610 - protein, 640 aa, Corynebacterium glutamicum
MCGLLGILTANGNAEAFVPALERALPCMRHRGPDDAGTWHDADAAFGFNRLSIIDIAHSHQPLRWGPADEPDRYAMTFNGEIYNYVELRKELSDLGYTFNTSGDGEPIVVGFHHWGESVVEHLRGMFGIAIWDTKEKSLFLARDQFGIKPLFYATTEHGTVFSSEKKTILEMAEEMNLDLGLDKRTIEHYVDLQYVPEPDTLHAQISRLESGCTATVRPGGKLEQKRYFKPQFPVQKVVKGKEQDLFDRIAQVLEDSVEKHMRADVTVGSFLSGGIDSTAIAPLAKRHNPDLLTFTTGFEREGYSEVDVAAESAAAIGAEHIVKIVSPEEYANAIPKIMWYLDDPVADPSLVPLYFVAAEARKHVKVVLSGEGADELFGGYTIYKEPLSLAPFEKIPSPLRKGLGKLSKVLPDGMKGKSLLERGSMTMEERYYGNARSFNFEQMQRVIPWAKREWDHREVTAPIYAQSRNFDPVARMQHLDLFTWMRGDILVKADKINMANSLELRVPFLDKEVFKVAETIPYDLKIANGTTKYALRRALEQIVPPHVLHRKKLGFPVPMRHWLAGDELFGWAQDTIKESGTEDIFNKQAVLDMLNEHRDGVSDHSRRLWTVLSFMVWHGIFVENRIDPQIEDRSYPVEL

SEQ ID NO: 8611 - protein, 404 aa, Vibrio vulnificus YJ016
MQNIGMSSKLDNVCYDIRGPVLKHAKRMEEEGHKILKLNIGNPAPFGFDAPDEILVDVIRNLPTSQGYCDSKGIYSARKAVVQHYQRKGIRSLDVEDVYVGNGVSELIVMAMQALLNNGDEMLVPAPDYPLWTAAVALSGGKAVHYLCDEQADWYPDLDDMRKKITPKTRGIVLINPNNPTGAVYSRDFLLEVIEIARQHKLMIFADEIYDKVLYDGAVHTSVATLTDDVLVMTFNGLSKAYRVCGFRGGWMFMTGPKHLAQGYVNGLDMLASMRLCANVPMQHAIQTALGGYQSINELILPGGRLLEQRDRAWELINQIPGVSCVKPKGAMYLFPKIDTKKYSIKDDQKMVFDFLVQEKVLLVQGSGFNWPKPDHFRIVTLPHIEDLETAIGRFERFLHGYSQ

SEQ ID NO: 8612 - protein, 115 aa, Zea mays
  misc_feature (44)..(44): Xaa can be any naturally occurring amino acid
  misc_feature (100)..(100): Xaa can be any naturally occurring amino acid
HASSNTLDGLNGFDGTDTHYFHSGPRGHHWMWDSRLFNYGNWEXLRFLLSNARWGLEEYKFDGFRFDGVTSMMYTHHGLQVTFTGNFNEYFGFATDVDAXVYLMLVNDLIHGLYP

SEQ ID NO: 8613 - protein, 339 aa, Ustilago maydis 521
MAANIPSFTLNTGAKLPSVGMGCWQGQPGPGRDNELVDALVRAIKVGYRHLDTATGYRNEAEVGQAVRQSGVARSEIFVTTKLRPGGVHDVVQELENSLNELGIDYIDLWLLHWPQGFTKDDGGFGTGESFGLEHQKHLGPTFNETWAKMEDVFLNSHKGKVKAIGVSNFSIKNLEILAKTSKVTPAVNQIEAHPYLPEHELVKYCKHKSIHVTAYSPLGQYNASIHEDKDLNEIAKKHDVTAATVALSWAVQRGTSVAPKSTNEKRMKQNITLIKLTDEEMKQVDVISQDPTRSTRLNYFVVNKETGTVLGWTMDEMGWEVGFLEEPGKSTKRIAERK

SEQ ID NO: 8614 - protein, 115 aa, Zea mays
  misc_feature (76)..(76): Xaa can be any naturally occurring amino acid
  misc_feature (100)..(100): Xaa can be any naturally occurring amino acid
  misc_feature (106)..(106): Xaa can be any naturally occurring amino acid
HASSNTLDGLNGFDGTDTHYFHSGPRGHHWMWDSRLFNYGNWEVLRFLLSNARWGLEEYKFDGFRFDGVTSMMYTXHGLQVTFTGNFNEYFGFATDVDAXVYLMLXNDLIHGLYP

SEQ ID NO: 8615 - protein, 666 aa, Bdellovibrio bacteriovorus HD100
MGIRRFWKYLSVANKLYIVIGVMALLIALELFTLYFAMNSLSSVRAFVAGESMWSKGQKDAVITLHKYARTRDPQFYITFQENVRVPLGDSKARNALEQVPPDTAKAKEGLLQGKVHPDDIPGVISLVLRFHDFKHVKKAIEIWREGDQMTQELIVMGENLHMLIQKNAPESEIFKALNSVDDLNDRLTVLEASFSYTLGEGSRWLENMLMITLIFAVLIVEGTGLFLTISFSRNLSKGLSELNSAAHEVGEGRFDVQVPVRSGDELGQLAESINLMAHHLSSSIGERQQAEQASQLKSLFLANMSHEIRTPLAAIIGFSDLLKESNLDESERLQYVNIIHRTGEHLTRIINDILDLSKVEAGHLEMQSHPVNLNSLLEDLHILMVARVGDKPVHVEFNRRGIVPDMIRTDPLRLRQILTNIIGNAIKFTDQGYVRMTYEISGSNLLFTVKDTGVGISSAQRSNLFQAFSQIDNSVSRKYEGTGLGLVLSRRLAQMMGGDVHLEDSEPGKGCTFIVKISLDIPKIHTQKIVPIKAKEVHLAAQLSSTSILLVDDVEDNRLLIQRMLAKRGANLTLATNGQEGLTKALEKEFDIILMDIQMPVMDGYTATRKLRQAGYSKPIIALTAHAMKDDRERCLEAGCTDYLTKPVQVESLIQTILNYSMETT

SEQ ID NO: 8616 - protein, 171 aa, Oryza sativa (japonica cultivar-group)
MLGRKQNAQQKGGGGGGRTGGGGGGEIEPVSVDIMEPFMDAISLTAFAAAPSAAAAAAGVPSTASMDWKETAAAHVFMADMPGVRREEVRVEVEEEKVLRISGQRARAAEEKGERWHRVERSSERFVRTVRLPPNANTDGVHAALDNGVLTITIPKDNDRKPHARIIPITN

SEQ ID NO: 8617 - protein, 160 aa, Helianthus annuus
MDIDSLMGFDPLLRNLHYILEATDDNTTGNKSNNSGPSRAYVRDARAMAATPADVKECPNSYVFIVDMPGLKSGDIKVQVERDNVLVISGKRNREEEKEGVKYVRMERRMGKFMKKFALPEDANTDKISAICQDGVLTVTVEKLPPPEPKKPKTIQVQVA

SEQ ID NO: 8618 - protein, 174 aa, Oryza sativa
TGYFAPTLRYGSPDDLKYFIDRCHAANIGVILDWVPGTFPKDDWALARFFDGTALYEHADPRLGEHMDWGTYIFYYGRNEVRSFLLSNAYYWLREFHIDGLRVDAVASMLYLDYSRKDGEWLPNAYGGRENLDVIEFLKQLNVMVGERFPGVLTIAEESTAWPAVSRPVYAGGL

SEQ ID NO: 8619 - protein, 115 aa, Zea mays
  misc_feature (32)..(32): Xaa can be any naturally occurring amino acid
  misc_feature (55)..(55): Xaa can be any naturally occurring amino acid
  misc_feature (64)..(64): Xaa can be any naturally occurring amino acid
  misc_feature (79)..(79): Xaa can be any naturally occurring amino acid
  misc_feature (81)..(81): Xaa can be any naturally occurring amino acid
  misc_feature (100)..(100): Xaa can be any naturally occurring amino acid
  misc_feature (106)..(106): Xaa can be any naturally occurring amino acid
HASSNTLDGLNGFDGTDTHYFHSGPRGHHWMXDSRLFNYGNWEVLRFLLSNARWXLEEYKFDGXRFDGVTSMMYTHHGXQXTFTGNFNEYFGFATDVDAXVYLMLXNDLIHGLYP

SEQ ID NO: 8620 - protein, 115 aa, Zea mays
  misc_feature (55)..(55): Xaa can be any naturally occurring amino acid
HASSNTLDGLNGFDGTDTHYFHSGPRGHHWMWDSRLFNYGNWEVLRFLLSNARWXLEEYKFDGFRFDGVTSMMYTHHGLQVTFTGNFNEYFGFATDVDAVVYLMLVNDLIHGLYP

SEQ ID NO: 8621 - protein, 829 aa, Aegilops tauschii subsp. strangulata
  misc_feature (388)..(388): Xaa can be any naturally occurring amino acid
  misc_feature (675)..(675): Xaa can be any naturally occurring amino acid
MLCLTAPSCSPSLPPRPSRPAADRPGPGISGGGNVRLSAVPAPSSLRWSWPRKAKSKFSVPVSAPRDYTMATAEDGVGDLPIYDLDPKFAGFKEHFSYRMKKYLDQKHSIEKHEGGLEEFSKGYLKFGINTENDATVYREWAPAAMDAQLIGDFNNWNGSGHRMTKDNYGVWSIRISHVNGKPAIPHNSKVKFRFHRGDGLWVDRVPAWIRYATFDASKFGAPYDGVHWDPPSGERYVFKHPRPRKPDAPRIYEAHVGMSGEKPEVSTYREFADNVLPRIKANNYNTVQLMAIMEHSYYASFGYHVTNFFAVSSRSERQRPQYLVDKAHSLRLRVLMDVVHSHASSNKTDGLNGYDVGQNTQESYFHTGERGYHKLWDSRLFNYANWXVLRFLLSNLRYWMDEFMFDGFRFDGVTSMLYNHHGINMSFAGSYKEYFGLDTDVDAVVYLMLANHLMHKLLPEATVVAEDVSGMPVLCRSVDEGGVGFDYRLAMAIPDRWIDYLKNKDDLEWSMSGIAHTLTNRRYTEKCIAYAESHDQSIVGDKTMAFLLMDKEMYTGMSDLQPASPTIDRGIALQKMIHFITMALGGDGYLNFMGNEFGHPEWIDFPEEGNNWSYDKCRRQWSLADIDHLRYKYMNAFDQAMNALDDKFSFLSSSKQIVSDMNEEKKIIVFERGXLVFVFNFHPSKTYDGYKVGCDLPGKYKVALDSDALMFGGHGRVAHDNDHFTSPEGVPGVPETNFNNRPNSFKILSPSRTCVAYYRVEEKAEKPKDEGAAFLGETALGYIDVEATGVKDAADGEATSGSEKASTGGDSSKKGINFVFLSPDKDNK

SEQ ID NO: 8622 - protein, 515 aa, Methanocaldococcus jannaschii
MCGINGIIRFGKEVIKEEINKMNKAIKHRGPDDEGIFIYNFKNYSIGLGHVRLAILDLSEKGHQPMGYNVDEDKIIYRDDELDRADIIIVYNGEIYNYLELKEKFNLETETGTDTEVILKLYNKLGFDCVKEFNGMWAFCIFDKKKGLIFCSRDRLGVKPFYYYWDGNEFIFSSELKGILAVKEINKKENINKDAVELYFALGFIPSPYSIYKNTFKLEARQNLIFDLDKREIRKYYYWELPDYKPIYDKKKLIEEGKKLLYDAVKIRMRSDVPVGAFLSGGLDSSTVVGVMREFTDLSKLHTFSIGFEGKYDETPYIKIVVDYFKTQHHHYYFKERDFEELIDKYSWIYDEPFGDYSGFPTYKVSEMARKFVTVVLSGDGGDEVFGGYMTHLNGYRMDFIRKLPKFLRVVGSKLPVKKDLNGIANLYLLKEAFRLSLINPEEFYAESIKEDAIRPEIYKKWTIEKLRYCLNKGDNKLGEALRIFDLLFNTLCDNFLVKVDRASMLTLWKLEVHF

SEQ ID NO: 8623 - protein, 444 aa, Glycine max
MESKPHVLMQRYELGRLLGQGTFGKVYYARSTITNQSVAIKVIDKDKVMRTGQAEQIKREISVMRLARHPNIIQLFEVLANKSKIYFVIEYAKGGELFNKVAKGKLKEDVAHKYFKQLISAVDYCHSRGVYHRDIKPENILLDENGNLKVSDFGLSALVDSKRQDGLLHTPCGTPAYVAPEVIKRKGYDGYLPFHDPNLIEMYRKISKAELKCPNWFPPEVCELLGMMLNPNPETRIPISTIRENSWFKKGQNIKNKRPVVENNTVSSSSTVLLDQNDCDGLAAEANGESVVPLSINAFDIISRSVGFDLSRFFDESFKKKEARFSSRLPANVIISKLEDIANQLRMKIKKKAAGLLKLESLNEGRKGVLSIDAEIFEVTPCFHMVEVKKSNGDTLEYQKILKEDIRPALQDIVWVWQSDQQLQSQQSEQQQQTDDQQQQQPQS

SEQ ID NO: 8624 - protein, 680 aa, Colwellia psychrerythraea 34H
MTTTAYPHLLAPLDLGFTQLANRVLMGSMHTGLEEERGGFAKLAAFYQARAKGGVGLIVTGGVSPNLRGRIAPFGSELSHFWQANKHKQVTDAVHQYPTKICLQLLHTGRYAYHPFGVAPSKIKSPISPFTPKAMSVRQIKSTIKDYAYSAKLAAKAGYDGVEIMGSEGYLINQFACVRTNKRNDEWGGSIENRMRLAIETIKAVRAKVGENFIIIFRLSMLDLVEGGNSWEEVVTMAKAVEQAGATLINTGIGWHEARVPTIVTSVPRAAFTWVTEKMKKEVSIPLITTNRINTPEVAEEVLATGQADMVSMARPFLADADFVNKAAENKADEINTCIGCNQACLDHVFAQKRASCLVNPMACYETELVIEKAKQVKKLAVIGAGPAGLAFSVYAAERGHHVELFDKISEIGGQFNVAKQVPGKEEFFETLRYFNKQISLLDIKVYLNTEQSAEKLLAAGFDEVVLATGIKPRKLDIKGLEEGYTSNKVLTYLQVLRDKVEVGNKVAIIGAGGIGFDVATYLSEKSLTNDPEAWLKNWGVDKQYLKNGALLSKQDIPKHDPARHITLIQRKTTKVGKGLGKTSGWVHRANLVKQGVTMLAGASYKAITEKGLVIEVDGKEQLLEVDNIIICAGQESNRDLQQKLIDGGLPVHLIGGANVAAELDAKRAIRQAAELAVKI

SEQ ID NO: 8625 - protein, 731 aa, Haemophilus influenzae R2866
MTTAVTQAIIDGFFDASNGDPFATLGMHETERGIEIRTLLPDASRVVVIERESGKEITELDCVDERGFFVGVIPNCRHFFAYQLQVFWGNEAQIVEDPYRFHPMIDDLEQWLLSEGSMLRPYEVLGAHFMECDGVSGVNFRLWAPNARRVSIVGDFNYWDGRRHPMRFHPKSGVWELFLPKVSLGQLYKFELIDCFGNLRLKADPYAFSSQLRPDTASQVSALPNVVEMTEARKKANQGNQPISIYEVHLGSWRRNLENNFWLDYDQIADELIPYVKEMGFTHIEFLPLSEFPFDGSWGYQPLGLYSPTSRFGSPEAFLRLVKRAHEAGINVILDWVPGHFPSDTHGLSAFDGTALYEHADPREGYHQDWNTLIYNYGRNEVKNFLSSNALYWLERFGVDGIRVDAVASMIYRDYSRAEGEWIPNQYGGRENLEAIEFLKHTNWKIHSEMAGAISIAEESTSFAGVTHPSENGGLGFNFKWNMGWMNDTLAYMKLDPIYRQYHHNKMTFGMVYQYSENFVLPLSHDEVVHGKYSLLDKMPGDTWQKFANLRAYYGYMWGYPGKKLLFMGNEFAQGREWNYEESLDWFLLDENIGGGWHKGVLKLVKDLNQIYQKNRPLFELDNSPEGFDWLVVDDAANSVFVFERRSSNGERIIVVSNFTPVPRHEYRIGVNIAGEYEEILNTDSMYYQGSNVGNFGYVASENIESHGRENSISVSIPPLATVYLRLKSVE

SEQ ID NO: 8626 - protein, 245 aa, Corynocarpus laevigatus
ALSIAGAVQSQKLAVCAISQLQSLPGGDIKLLCDTVVESVRELTGYDRVMVYKFHEDEHGEVVAESKRADLDPYIGLHYPATDIPQASRFLFKQNRVRMIVNCHASSVRVIQDEELRQPLCLVGSTLRAPHGCHAQYMANMGSIASLAMAVVINGTDEEGTGGRNSMRLWGLVACHHTSARCIPFPLHYACEFLMQAFGLQLNVELQLALQLSEKHVLRTQTLLCDMLLRDSPTGIVTQSPSIMD

SEQ ID NO: 8627 - protein, 458 aa, Bacillus cereus E33L
MGENHDKQRQSLLGKDFNEIGERNEQAILHSQTVGSRGPVLEQDSVLHEALQEFIHEKILERPVHVKGFGAFGYFQTIYPMSEHTKLSFLQHSNEKVPVMVRFSLAVSTKGTPDTARNVRGFSTKFYTKEGIFDLLCNHIPVFSVRDPMRFPETIQALSPSPKNNLLDPNRFWSFVARAPESIHFVVRLYSDNGTAKSLRRIPGHSVNTYVWRNAEGNRKYVKYHWYPFEGVQFITSEEANKLAAENPDYSGKDLYDAIANGKPVEYGLYVQLMDPKDETHLSYDPLDDTKIWDEKAYPLIPVGKMVLNKNPENYMEQVEKVAFSPSNLLDGAELSDDKMLQGRANIYSDSQRRRIGPEFRKLAINQQQDWTPANQITSGDGRYVEGKLERTSIPKQDDFTQAGEFYAKLKLIEKEHLAENLASDLKVISDDIRKVVLGYFHKVSADLVKRIETEIEK

SEQ ID NO: 8628 - protein, 1222 aa, Cytophaga hutchinsonii
MSQEHESSFQDPSRDELIQQVKELQIINANQRPEKILQEAFEKINLLVITIDQDGLIVYANEAFLEVIGWEKQRLLGENWKEFLEPGKDKNKEEHIYTLIKKQGFIDQLKRKFLSKEGDYRTIKFNVVIHHPIGNDVHLTTLIGEDITDKKKVIRALKDSNDQLQDLFENANDLIQVFDLDGKIQFVNRAWKDILQYSDEEILKLNFRDIIAKEQVGVTMEHLNNILAGKKDDKFETVFTSKNGRNIQVICSVNVRYEKEKPVSFRGIFHDNTEHMRAERAQNLYYKISTLAINSDRLDSLLDNIHKELRTIIAVNNFHVALYDRDHNYLNFPYYVDENIGPKPISMKRIVGKGLTEYSLFNEEPTFLYEEDINKLSEAGAIELLGPTPKIWLGVPLRLENRTIGVICVKSHSDRNKYKRRHVELLDFISGQIALVIERKRNEEQIIDKTARLNAIFESSSHLIWSVNRKRGLTSFNQNYANAIFRKYQKYPTIYDEGVTKEVLVLSDPEFHDSIDKKYKDAFNGQPQHFEACNTNQNGEIFWRETYLNPIFLPDGRIDEVSGISHDITEKKQWEITIQESEEKFRNIFESFQDIYYRTDLSGYITMISPSGCELSGYTQEEIIGKHISEFFTTPKQQVNLIREVLKTGRVKNYETNVNIKGGESIQSISNIRLIYNNEGKPIGVDGVARDITFLKKASQELYHAKEIAEKSLKVKENFLANMSHEIRTPMNGVIGMIDLLNETPLMEEQRKYVQTIKKSSETLLNILNDILDLSKIEAGKMQLRLAPISIEQTVEKLHALFYQQATLKNIDLLYSIDSNVPKVVLADETRLLQILSNLTSNAIKFTDQGSVRIQISLQSKKDLVNKIRVNISDTGIGIAQDKLNVLFGYFNQVDNSSSKSYGGTGLGLAISKELSKLMNGEIGVQTEANKGSVFWFTFEANESKRLVEAKVETPNAFSSEKTFKDYPKILLVDDNAINLFVASEILRKAGCEIDTAGNGLEAIQKVKENPYRMVLMDIQMPQMDGIEATAEIRKLNLAYTPPIIAMTAYSMKEDKDRFMVNGMDDYIAKPIKAESLISKVKAWLDSNAAKNGHTATQTSDETAVEIPILDLEVFEKLKSLSGAEIIDQIYKEFENESLEQIVDCKNSLAMGDFHNILNKLHTLKGVSGTLGLIELESISRLVESKLKKGDYPELAVDIEKLSEAHNRFIEHYTFILNSNSK

SEQ ID NO: 8629 - protein, 435 aa, Arabidopsis thaliana
MEEERRVLFGKYEMGRLLGKGTFAKVYYGKEIIGGECVAIKVINKDQVMKRPGMMEQIKREISIMKLVRHPNIVELKEVMATKTKIFFVMEFVKGGELFCKISKGKLHEDAARRYFQQLISAVDYCHSRGVSHRDLKPENLLLDENGDLKISDFGLSALPEQILQDGLLHTQCGTPAYVAPEVLKKKGYDGAKADIWSCGVVLYVLLAGCLPFQDENLMNMYRKIFRADFEFPPWFSPEARRLISKLLVVDPDRRISIPAIMRTPWLRKNFTPPLAFKIDEPICSQSSKNNEEEEEDGDCENQTEPISPKFFNAFEFISSMSSGFDLSSLFESKRKVQSVFTSRSSATEVMEKIETVTKEMNMKVKRTKDFKVKMEGKTEGRKGRLSMTAEVFEVAPEISVVEFCKSAGDTLEYDRLYEEEVRPALNDIVWSRAR

SEQ ID NO: 8630 - protein, 582 aa, Glycine max
MCGILAVLGCSDDSRAKRVRVLELSRRLKHRGPDWSGLHQHGDCFLAHQRLAIVDPASGDQPLFNEDKSVIVTVNGEIYNHEELRKQLPNHKFRTGCDCDVIAHLYEEHGEDFVDMLDGIFSFVLLDTRDNSFIVARDAIGVTSLYIGWGLDGSVWISSEMKGLNDDCEHFECFPPGHLYSSKERGFRRWYNPPWFSEATPSTPYDPLVLRHTFEQAVIKRLMTDVPFGVLLSGGLDSSLVASVTSRYLANTKAAEQWGSKLHSFCVGLEGSPDLKAAKEVADYLGTVHHEFTFTVQDGIDAIEDVIYHVETYDVTTIRASTPMFLMSRKIKSLGVKWVISGEGSDEIFGGYLYFHKAPNKEEFHRETCRKIKALHQYDCLRANKSTFAWGLEARVPFLDKAFINTAMSIDPESKMIKRDEGRIEKWILRRAFDDEEHPYLPKHILYRQKEQFSDGVGYSWIDGLKAHAAKHVTDKMMLNAGNIYPHNTPTTKEAYYYRMIFERFFPQNSARLTVPGGASVACSTAKAVEWDAAWSNNLDPSGRAALGVHISAYENQNNNKGVEIEKIIPMDAAPLGVAIQG

SEQ ID NO: 8631 - protein, 545 aa, Porphyromonas gingivalis
MAKEIKFDMESRDLLKKGVDALPNAVKVTLGPKVRNVILSKTYGAPHITKDGVSVAKEIELECPFENMGAQLVKEVASKTNDDAGDGTTTATILAQSIIGVGLKNVTAGANPMDLNRGIDKSVKSVVTHIAGMAKEVGADFQKIEHVAKISANGDENIGSLIAEAMRKVKKEGVITVEEAKGTDTTVEVVEGMQFDRGYISPYFVTNTDKMEVQMENPFILIYDKKISVLKEMLPILEQTVQTGKPLLIIAEDNDSEALPTLVVNRLRGSLKICAVKAPGFGDRRKAMLEDIAILTGGAVISEETGLNLENTTMDMLGTAEKVRVDKDNTTIVNGAGNKEGIASRITQIKAQIENTTSDYDREKLQERLAKLAGGVAVLYVGAASEVEMKEKKDRVEDPLSPTRPPIEEGTVPGGGTTYIRAIAALEGLKGENEDETTGIEIVKRAIEEPLRQIVANAGKEGAVMVQKVKEGKDDFGYNARTDVFENLYTTGVIDPAKVTRVALENAASIAGMFLTTECVIADKKEDNPAAPAMPGGMGGMGGMM

SEQ ID NO: 8632 - protein, 159 aa, Triticum aestivum
ALPTLYKVLESAIADRGTGSSAQGQVIWIHFGVNSGATRFALENQAVNEATFRCPDELGWKPQRVPIVPSDGSISRTRETTLPVNELTKSLRKIGYDVVPSDDAGRFVCNYVYYHSLRFAEQHGIKSLFVHVPLFLTIDEEVQMHFAASLLEVLASSSN

SEQ ID NO: 8633 - protein, 454 aa, Oryza sativa (japonica cultivar-group)
MSTTKVKRRVGKYELGRTIGEGTFAKVKFARDTETGDPVAIKILDKEKVLKHKMVEQIKREISTMKLIKHPNVVRIYEVMGSKTNIYIVLEYVTGGELFDTIVNHGRMREDEARRYFQQLINAVDYCHSRGVYHRDLKPENLLLDSYGNLKVSDFGLSALSQQIKDDGLLHTTCGTPNYVAPEVLEDQGYDGAMADLWSCGVILFVLLAGYLPFEDSNLMTLYKKISNAEFTFPPWTSFPAKRLLTRILDPNPMTRITIPEILEDEWFKKGYKRPEFDEKYDTTLDDVDAVFNDSEEHHVTEKKEEPEALNAFELISMSAGLNLGNLFDSEQEFKRETRFTSKCPPKEIVRKIEEAAKPLGFDVQKKNYKICSPCLTTICMNIPFKLRLEKVKAGRKGNLNVATEILQVAPSLHMVEVRKAKGDTLEFHKFYKNLSRTLKDVVWKSDDLQNQLS

SEQ ID NO: 8634 - protein, 322 aa, Candida tenuis
MSASIPDIKLSSGHLMPSIGFGCWKLANATAGEQVYQAIKAGYRLFDGAEDYGNEKEVGDGVKRAIDEGLVKREEIFLTSKLWNNYHDPKNVETALNKTLADLKVDYVDLFLIAFPIAFKFVPIEEKYPPGFYCGDGNNFVYEDVPILETWKALEKLVAAGKIKSIGVSNFPGALLLDLLRGATIKPAVLQVEHHPYLQQPKLIEFAQKAGVTITAYSSFGPQSFVEMNQGRALNTPTLFAHDTIKAIAAKYNKTPAEVLLRWAAQRGIAVIPKSNLPERLVQNRSFNTFDLTKEDFEEIAKLDIGLRFNDPWDWDNIPIFV

SEQ ID NO: 8635 - protein, 573 aa, Debaryomyces hansenii CBS767
MCGIFAAFRQPEVEQFKSKALQYSKRIRHRGPDWSGNVIQNSTILCHERLAIVGLDSGAQPITSEDGNYTLAVNGEIYNHIQLRDEFPSYPYKSLSDCEPIIPLFEKYDVDAPKYLDGMFAWVLYDKKNDRIVASRDPIGITTLYMGKSSKNPKTRYFASELKCLTDECDEIFAFPPGHVYDSNTDEITRYFNPSWWEESSIPSKRVDLKEVRETLELAVRKRLMAEVPYGVLLSGGLDSSLIAAIAARETQKAAAGISKDGIDANKELSGVDEKGSLHSSGWNQLHSFAIGLPGAPDLIAAEKVAHFIGTIHHSHTFTLDEGLDALDDVIYNLETYDVTTIRASTPMYLLSRKIKAQGVKMVLSGEGSDEIFGGYLYFANAPSPKDFHEECVKRVKNLHYADCLRANKSTMAWGLEARVPFLDKQFLEVCMNINPEDKLIKPAEGKIEKYILRKAFDTSDDPNAKPYLPEEILWRQKEQFSDGVGYSWIDGLKDAAEAAISDEQFANPKAEWGTDVPTTKEAYWYRCKFDEIFHSKAAASTVMRWVPKAEWGCHADPSGRFATIHEQKVDQD

SEQ ID NO: 8636 - protein, 524 aa, Enterococcus faecalis
MAKEIKFAEDARAAMLRGVDVLADTVKVTLGPKGRNVVLEKSFGSPLITNDGVTIAKEIELEDHFENMGAKLVSEVASKTNDIAGDGTTTATVLTQAIVREGLKNVTAGANPLGIRRGIELATKTAVEELHNISSVVDSKEAIAQVAAVSSGSEKVGQLIADAMEKVGNDGVITIEESKGIETELDVVEGMQFDRGYLSQYMVTDNDKMEAVLENPYILITDKKISNIQDILPLLEQILQQSRPLLIIADDVDGEALPTLVLNKIRGTFNVVAVKAPGFGDRRKAMLEDIAILTGGTVITDDLGLELKDTTIENLGNASKVVVDKDNTTIVEGAGSKEAIDARVHLIKNQIGETTSDFDREKLQERLAKLAGGVAVVKVGAATETELKELKLRIEDALNATRAAVEEGMVSGGGTALVNVIGKVAALEAEGDVATGIKIVVRALEEPIRQIAENAGYEGSVIVDKLKNVDLGIGFNAANGEWVNMVEAGIVDPTKVTRSALQNAASVSALLLTTEAVVADKPEP

SEQ ID NO: 8637 - protein, 59 aa, Zea mays
  misc_feature (17)..(17): Xaa can be any naturally occurring amino acid
  misc_feature (32)..(32): Xaa can be any naturally occurring amino acid
  misc_feature (45)..(46): Xaa can be any naturally occurring amino acid
  misc_feature (55)..(55): Xaa can be any naturally occurring amino acid
HASSNTLDGLNGFDGTXTHYFHSGPRGHHWMXDSRLFNYGNWEVXXFLLSNARWXLEEY

SEQ ID NO: 8638 - protein, 719 aa, Neurospora crassa
MRVNALLPLSGLIGTALAACPFADPSALGRRAEGGEVDARQRLKEVEVDDNGQFMTTDFGGNIEEQFSLKAGGRGSTLLEDFIFRQKLQHFDHERIPERVVHARGAGAHGIFTSYGDWSNITAASFLGAKDKQTPVFVRFSTVAGSRGSADTARDVHGFATRFYTDEGNFDIVGNNIPVFFIQDAIRFPDLIHSVKPSPDNEVPQAATAHDSAWDFFSSQPSALHTLFWAMSGNGIPRSYRHMDGFGIHTFRLVTEDGKSKLVKWHWKTKQGKAALVWEEAQVLAGKNADFHRQDLWDAIESGNAPSWELAVQLIDEDKAQAYGFDLLDPTKFLPEEFAPLQVLGEMTLNRNPMNYFAETEQISFQPGHIVRGVDFTEDPLLQGRLYSYLDTQLNRHRGPNFEQLPINRPVSGVHNNHRDGQGQAWIHKNIHHYSPSYLNKGYPAQANQTVGRGFFTTPGRTASGVLNRELSATFDDHYTQPRLFFNSLTPVEQQFVINAIRFEASHVTNEQVKKNVLEQLNKISNDVAKRVAVALGLEAPQPDPTYYHNNVTRGVSIFNESLPTIATLRVGVLSTTKGGSLDKAKALKEQLEKDGLKVTVIAEYLASGVDQTYSAADATAFDAVVVAEGAERVFSGKGAMSPLFPAGRPSQILTDGYRWGKPVAAVGSAKKALQSIGVEEKEAGVYAGAQDEVIKGVEEGLKVFKFLERFAVDGDDEE

SEQ ID NO: 8639 - protein, 524 aa, Enterococcus mundtii
MAKELKFAEDARAAMLRGVDKLADTVKVTLGPKGRNVVLEKSYGSPLITNDGVTIAKEIELEDHFENMGAKLVSEVASKTNDIAGDGTTTATVLTQAIVREGLKNVTAGANPLGIRRGIELATKTAVEELHNISTVVDSKEAIAQVAAVSSGSEQVGPLIAYAMEKVRNDGVITIEESKGIETELDVVEGMQFDRGYLSQYMVTDNDKMEAVLENPYLLITDKKISNIQDILPLLEQILQQSRPLLIIADDVDGEALPTLVLNKIRGTFNVVAVKAPGFGDRRKAMLEDIAVLTGGTVITDDLGLELKDATIENLGNASKVVVDKDNTTIVEGSGDKPAIDARVQLIKNQIAETTSDFDREKLQERLAKLAGGVAVVKVGAATETELKELKLRIEDALNATRAAVEEGMVSGGGTALVNVINKVAMIEAEGDVATGIKIVTRALEEPIRQIAENAGYEGSVIVDKLKNVDLGTGFNAATGEWVNMVEAGIVDPTKVTRSALQNAASVSALLLTTEAVVADKPEP

SEQ ID NO: 8640 - protein, 526 aa, Enterococcus cecorum
MAKEIKFAEDARAAMLRGVDKLADTVKVTLGPKGRNVVLEKSFGSPLITNDGVTIAKEIELEDHFENMGAKLVSEVASKTNDIAGDGTTTATVLTQAIVREGLKNVTAGANPLGIRRGIELATKAAVEELHNISAIVDSKEAIAQVGAVSSGSEQVGNYIADAMEKVGNDGVITIEESKGIETELEVVEGMQFDRGYLSQYMVTDNDKMEAVLENPYILTTDKKISNIQEILPLLEQILQQSKPLLIIADDVDGEALPTLVLNKIRGTFNVVAVKAPGFGDRRKAMLEDIAILTGGTVITEDLGLELKDATLQSLGQASKVVVNKDTTTIVEGAGDSENIAARVQIIKGQIAETTSDFDREKLQERLAKLAGGVAVIKVGAPTETELKEMKLRIEDALNATRAAVEEGMVSGGGTALVNVINKVAEAESKETGDVATGVRIVLRALEEPVRQIAENAGYEGSVIVDRLKKEKLGVGFNAATGEWVNMLEAGIVDPTKVTRSALQNAASVAALLLTTEAVVADKPEP

SEQ ID NO: 8641 - protein, 283 aa, Listeria innocua Clip11262
MKTVKLNNGIEVPILGFGTYQITDAGEAEQAVKEAIAAGYRHIDTAQSYMNEEAVGRGIAASGVDRKELFITTKIWVENVSYKGVMSSFDRSLKRLGLDYIDLLLIHQPYNDVYGAWMAMEELQAQGKIKAIGVSNFGVDRVVDLAAFNDITPQVNQIEINPFQQQSKNIEALRKEGVAVEAWAPFAEGKNDIFTNPILTKIAEKYGKSVAQVILRWLIEQDIIVLAKSVKPERMAQNLAVFDFELSEEDKSAIATLNQGESQFFSHADPEMVKWMASRKINI

SEQ ID NO: 8642 - protein, 245 aa, Corynocarpus laevigatus
ALSIAGAVQSQKLAVCAISQLQSLPGGDIKLLCDTVVESVRELTGYDRVMVYKFHEDEHGEVVAESKRADLDLYIGLHYPATDIPQASRFLFKQNRVRMIVNCHASSVRVIQDEELRQPLCLVGSTLRAPHGCHAQYMANMGSIASLAMAVVINGTDEEGTGGRNSMRLWGLVACHHTSARCIPFPLRYACEFLMQAFGLQLNMELQLALQLSEKHVLRTQTLLCDMLLRDSPTGIVTQSPSIMD

SEQ ID NO: 8643 - protein, 586 aa, Triphysaria versicolor
MCGILAVLGCSDDSQAKRVRVLELSRRLKHRGPDWSGIHHHGDCYLAHQRLAIVDPASGDQPLFNEDKRIAVTVNGEIYNHEELRALLPNHKFRTGSDCDVIAHLYEEYGENFVEMLDGMFSFVLLDSRDNTFIAARDAFGITSLYIGWGLDGSVWISSELKGLHDECENFEVFPPGHVYSSKTEGFRRWYNPPWFSEAIPSTPYDPLVLRGAFEQAVIKRLMTDVPFGVLLSGGLDSSLVAAVTARHLAGTKAAKRWGSQLHSFCVGLEGSPDLKAGKEVADYLGTVHHEFLFTVQDGIDAIEDVIYHIETYDVTTIRASTPMFLMSRKIKSLGVKMVISGEGSDEIFGGYLYFHKAPNKEEFHRETCRKIKALHQYDCLRANKATSAWGLEARVPFLDKEFVNLAMSIDPEAKMIKPDQGRIEKWILRKAFDDEERPYLPKHILYRQKEQFSDGVGYSWIDGLKAHAEQHVTDKMMLNAGHIFPHNTPTTKEGYYYRMIFERFFPQNSAKLTVPGGPSVACSTATAVAWDASWSKNLDPSGRAATGVHDLAYENHVPIGNLKSKKMDSVSLGNAVGPQELTIRS

SEQ ID NO: 8644 - protein, 89 aa, Zea mays
  misc_feature (45)..(45): Xaa can be any naturally occurring amino acid
  misc_feature (64)..(64): Xaa can be any naturally occurring amino acid
  misc_feature (74)..(74): Xaa can be any naturally occurring amino acid
HASSNTLDGLNGFDGTDTHYFHSGPRGHHWMWDSRLFNYGNWEVXRFLLSNARWGLEEYKFDGXRFDGVTSMMXTHHGLQVTFTGNFNE

SEQ ID NO: 8645 - protein, 546 aa, Geobacter metallireducens GS-15
MAKIIKFDQEGRNAILKGVNTLADAVKVTLGPKGRNVIIEKSFGSPLITKDGVTVAKEIELEDKFENMGAQLVKEVASKTSDVAGDGTTTATVLAQAIYRQGSKLVAAGHNPMEIKRGIDSAVETIVAELQKISKPIKDHKEIAQVGTISANNDKTIGGIIAEAMEKVGKEGVITVEEAKAMETSLETVEGMQFDRGYLSPYFVTDPERMEASLENANILIHDKKISNMKDLLPILEQTAKSGRPLLIIAEDIEGEALATLVVNKLRGVLNICAVKAPGFGDRRKAMLEDIAVLTGGKVISEELGFKLENATFDMLGTAKRVTIDKDNTTIIDGDGSEADIQGRVKQIRAQIEETSSDYDREKLQERLAKLVGGVAVIKVGAATETEMKEKKARVEDALHATRAAVDEGIVPGGGVAYIRSLGALEGISLPAEQQFGVTLIKRALEEPIRQIAQNAGVDGSIVVDKVKNGKDAFGFNAADDEYVDMIAAGIIDPTKVSRSALQNAASVAGLMLTTEAMIADKPKEEAAMPAMPGGMGGMGGMGGMM

SEQ ID NO: 8646 - protein, 374 aa, Crossosoma bigelovii
ALSIAGAVQSQKLAVRAISHLQSLPSGDIKLLCDTVVENVRELTGYDRVMVYKFHEDEHGEVVAESKRPDLVPYIGLHYPATDIPQASRFLFRQNRVRMIVDCNATPVKVIQDESLMQPLCLVGSTLRAPHGCHAQYMANMGSNASLAMAVIINGNEEEGVGGRSPMKLWGLVVCHHTSARCIPFPLRYACELLMQALGPQLNMELQLASQSSEKRVLRTQTLLCDMLLRDSPTGIVTQSPSIMDLVKCDGAALYYQGKYYPLGVTPTEPQIKDIVEWLLAFHGDSTGLSTDSLADAGYQGAATLGDAVCGMAVAYITKRDFLFWFRSHTAKEIKWGGAKHHPADKDDGQRMHPRSSFKAFLEVVKSRSLPWEN

SEQ ID NO: 8647 - protein, 245 aa, Eucryphia billardieri
ALSIAGAVQSQKLAVRAISQLQSLPGGHIKLLCDTVVESVRELTGYDRVMVYKFHEDEHGEVVAESKRPDLEPYIGLHYPATDIPQASRFLFKQNRVRMIVDCHATPVRVIQDEGLIQPLCLVGSTLRAPHGCHAQYMANMGSTASLAMAVIINGNDEEAIGGRNSMRLWGLVVCHHTSARSIPFPLRYACEFLMRAFGLQLNMELQLALQLSEKHILRTQTLLCDMLLRDSPTGIVTQSPSIMD

SEQ ID NO: 8648 - protein, 376 aa, Triticum aestivum
MDTSGGGTAAGGAAQIQGMATHGGRYVLYNVYGNLFEVASKYAPPIRPIGRGAYGIVCAAVSSDTGEEVAIKKIGNAFDNHIDAKRTLREIKLLRHMDHENILAIKDLIRPPRRDDFKDVYIVTELMDTDLHQIIRSNQSLTDDHCQYFLYQLLRGLKYVHSANVLHRDLKPSNLFLNANCDLKIADFGLARTTSETDLMTEYVVTRWYRAPELLLNCSQYTAAIDVWSVGCILGEIITRQPLFPGRDYIQQLKLITELIGSPDDSSLGFLRSDNARRYMKQLPQYPRQDFRLRFRNMSDGAVDLLERMLVFDPSRRITVDEALHHPYLASLHDINEEPTCPAPFSFDFEQPSFTEEHMKELIWRETLAFNPDPPY

SEQ ID NO: 8649 - protein, 279 aa, Enterococcus faecalis V583
MITSLADTVTLNNGTKIPGMGLGVFQIPDEETAKVVEEGIINGYRLIDTAQIYGNESGTGAGIKAGLAATGLNREDLFVTSKVWNAHISYDETIQAFNDSLERLGLDYLDLYLIHWPGNNSYKESWQALETLYAEGKVKAIGVSNFQVHHLEDLLSYAKVVPVINQVELHPKLDQKEVRDFCEKHDIKVQAWSPLMQGQLLSNETILAIAENHNKSAAQVILRWDIQQDILLAVKSVHKERMISNAAVFDFELSAEEMAQINQLNESLRVGPDPDTFDF

SEQ ID NO: 8650 - protein, 508 aa, Xanthomonas axonopodis pv. citri str. 306
MRVAVLSVALSLALFASPGWAQKAGPAAAQASADDPEANEAAVSKVPLDEIRRFVAVYNAVKQAYVDPVEDKKLMHAAVRGLLSDLDPHSTYFDKEDAEAFDEQATGAYDGIGVELLQQQDNTLKVIAPIDDTPAARAGIRAGDVIVAIDGKPIDASKAMEPLRGESGSKVVLTIMRDKMPKPFDVTLQRETIRVASVRSKLLEPGFGYIRISTFQADTGADFQKNLKQLQAGGKLRGLVLDLRSNPGGLLTSAVQVADDLLDKGNIVSTRGRISISDAKFDATPGDLLNGAPVVVLVDAGSASASEVLAGALRDNKRARIIGSRTFGKGSVQTVLPLDNGDSVKLTTARYYTPSGKSIQASGIVPDVLLTPEPQPGDADVPASLTDYSEATLPGHLRGDDEGEEGYSAGDVLPGDGPITEALAELKQPGAAAKAQAARKAKAQAAQKAKAANKTGAEPKPAAARPATTDKPRSAEPAGKAKPATTPPAPAEPVQPTTPTDKPAEPVN

SEQ ID NO: 8651 - protein, 245 aa, Eucryphia billardieri
ALSIAGAVQSQKLAVRAISQLQSLPGGHIKLLCDTVVESVRELTGYDRVMVYKFHEDEHGEVVAESKRPDLEPYIGLHYPATDIPQASRFLFKQNRVRMIVDCHATPVRVIQDEGLIQPLCLVGSTLRAPHGCHAQYMANMGSTASLAMAVIINGNDEEAIGGRNSMRLWGPVVCHHTSARSIPFPLRHACEFLMQAFGLQLNMELQLALQLSEKHILRTQTLLCDMLLRDSPTGIVTQSPSIMD

SEQ ID NO: 8652 - protein, 245 aa, Aleurites moluccana
ALSIAGAVQSQKLAVRAISRLQSLPGGDIKLLCDTVVECVKELTGYDRVMVYKFHEDEHGEVVAESKRPDLEPYIGLHYPSTDIPQASRFLFKQSRVRMIVDCHATAVSVIQDEALMQPLCLVGSTLRAPHGCHAQYMANMGSIASLAMAVIINGNDEEAIGGRNSMRLWGLVVCHHTSARSIPFPLRYACEFLMQAFGLQLNMDLQLASQFSEKHVLRTQTLLCDMLLRDSPTGIVTQSPSIMD

SEQ ID NO: 8653 - protein, 555 aa, Vibrio fischeri ES114
MCSIFGILDIKSDPTPLRTTALEMSKKLRHRGPDWSGIYSSDKAILAHERLAIVGLNSGAQPLYSEDKKHILAVNGEIYNHKELREKYADNYTFQTDSDCEVILALYREKGADLLEDLNGIFAFILYDEEKDEYLIGRDHIGIIPMYHGYDEHGNYYVASEMKALVPVCKSISEFPPGHFYSSKDTEPTRYYLRDWMDYDAVKDNPTSKEDLTQALEDAVKRQLMTDVPYGVLLSGGLDSSITSAVAKRFAAMRIEDDEKSEAWWPQLHSFAVGLEGAPDLKAAREVADKLGTVHHEMTYTIQEGLDAIRDVIYHIETYDVTTIRASTPMFLMGRKIKAMGIKMVLSGEGADEIFGGYLYFHKAPNKKEFHEETVRKLLALNMFDCARANKSLAAWGVEGRVPFLDKEFIDVAMRLNPQDKMCGNGKMEKHILRECFEHYLPEAIAWRQKEQFSDGVGYSWIDTLRETAEAKVTDQQMESAKFRFPYNTPTTKEAYVYREIFEELFPLEDAAKCVPGGPSVACSSAKAIEWDESFQNCVDPSGRAVQAVHNEAYD

SEQ ID NO: 8654 - protein, 542 aa, Lactococcus lactis subsp. cremoris
MSKEIKFSSDARTAMMRGIDILADTVKTTLGPKGRNVVLEKSYGSPLITNDGVTIAKEIELEDHFENMGAKLVSEVASKTNDIAGDGTTTATVLTQAIVREGLKNVTAGANPVGIRRGIELAAETAVASIKEMAIPVHDKSAIAQVATVSSRSEKVGEYISDAMERVGSDGVITIEESKGMQTELDVVEGMQFDRGYLSQYMVSNTEKMVAELDNPYILITDKKISNIQEILPLLEQILKTNRPLLIVADDVDGEALPTLVLNKIKGVFNVVAVKAPGFGDRRKAQLEDLAILTGGTVITEELGLDLKDATLEALGQAAKATVDKDHTTIVEGAGSVGAISDRVAIIKAQIEKITSDFDREKLQERLAKLAGGVAVVKVGAATETELKAMKLLIEDALNATRAAVEEGIVSGGGTALVNAIAALDKLSEEGDIQTGINIVRRALEEPVRQIAANAGYEGSVIIDKLRSEKVGTGFNAATGQWVNMIEEGIVDPAKVTRSALQNAASVAGLILTTEAVVANKPEPAAPAMPPMDPSMGMGGMM

SEQ ID NO: 8655 - protein, 466 aa, Escherichia coli O6
MDKKQVTDLRSELLDSRFGAKSISTIAESKRFPLHEMRDDVAFQIINDELYLDGNARQNLATFCQTWDDDNVHKLMDLSINKNWIDKEEYPQSAAIDLRCVNMVADLWHAPAPKNGQAVGTNTIGSSEACMLGGMAMKWRWRKRMEAAGKPTNKPNLVCGPVQICWHKFARYWDVELREIPMRPGQLFMDPKRMIEACDENTIGVVPTFGVTYTGNYEFPQPLHDALDKFQADTGIDIDMHIDAASGGFLAPFVAPDIVWDFRLPRVKSISASGHKFGLAPLGCGWVIWRDEEALPQELVFNVDYLGGQIGTFAINFSRPAGQVIAQYYEFLRLGREGYTKVQNASYQVAAYLADEIAKLGPYEFICTGRPDEGIPAVCFKLKDGEDPGYTLYDLSERLRLRGWQVPAFTLGGEATDIVVMRIMCRRGFEMDFAELLLEDYKASLKYLSDHPKLQGIAQQNSFKHT

SEQ ID NO: 8656 - protein, 909 aa, Bdellovibrio bacteriovorus HD100
MTLRLRIFLFNLISVFLATFVVALIGLKIVESTVIDSTYERLTQIRISKTSSIENYFRDLQTAINLISSHELTDDLLRERKVDSLPEFRRLLDNYVLDFNIYDMALINNQGVVVYTTRKDIEDGASVTTDLPQGSKLKDIYTWGVKAQEGSTLFLDFDKDTLNPNSATGFVASPIYRNLRPVGVLVLKISISEIDRITSDNFAWPTHGMGQTGETLIYGEDWSLRNTGRFRVEANQSAQGSLEAEVLSSNRGDEDIKKIENLSEVRELGTDYRGQKVIRSIGKIYLPNGELWYIQTKIDESEAFAVLDRIAIASSAAAVLIFILFFFATFAATGKVVEPIQLLTDRLEKLGTSNLTQKINYNSKDEIGLLVSKYNQLADRLETTTVSKEFLDSVIQSIKAFLFIVKVSHHDDWRQASYMISQANESALKFLGYSLNQISHVDLKQLINTQEEFNNYTWLLQTRLSIEAEITAQDGRRLPILMNWAALPNRTSKDLTFVFVCTDITDRITAEQALIEAREQAVKASQAKSEFLARMSHEIRTPLNAIIGITDILAESDLKPEQSQLVRVCANAGENLLALINDILDISKIEAREVRLEKIAFDLESTTTNICDILKQKATEKDLKFSLTVNLPKNRAPLVIGDPTRLRQILFNLIGNAIKFTQEGEIAVLLDFDSSSQKFVRFTIRDTGTGIPKDKQHLLFQSFVQADSSITRKFGGSGLGLTISKNLVELMGGRIWFQSEEGSGSSFYFTVPYVPTEAPRELAAPEKTQAAETTPRPTMNELTVTRSARILVVDDTEDNRFLLLTYLKKLPFEVVQAENGKEAVEKVLAEPFDLILMDIQMPVMDGYAATRKIRQWEKDQGLKPIPIIAVSANAMAEDMQKSLDVGCSEHVTKPIKKSALLEMIHRYLG

SEQ ID NO: 8657 - protein, 325 aa, Shewanella oneidensis MR-1
MQTLAQHLTSKAVNESLAQLILTLADTSKAISHAVRHGALAGVLGATEQENVQGETQKKLDIITNDMLKDALKADGTVRGLASEEEDHVVEVSANGQYLVCFDPLDGSSNIDINSLVGTIFSVLPAPQGELTEASFLQSGRNQLAAGYVLYGPSTMLALTTGQGVQLFTLHPETNEFLLTNATMSISPDTSEFAINMSNQRFWEAPMQTYIADLLLGKIGPREKSFNMRWIAAMVGDVHRVLSRGGIFTYPTDNKDPKKPYKLRLMYEANPMAFLVEQAGGKASTGYETILDIQPTQIHQRVAVILGSANEVDACLSYHGIDSRK

SEQ ID NO: 8658 - protein, 524 aa, Vagococcus fluvialis
MTKDIKFSEDARSSMMRGVDTLADIVKVTLGPKGRNVVLDKSFGSPLITNDGVTIAKEVELEDRFENMGAQLVAEVASKTNDIAGDGTTTATVLTQAIVREGLKNVTAGANPIGIRRGIELATKKAVEELHALSKQVDSKEAIAQVAAVSSGSDTIGELISEAMDKVGNDGVITIEESKGIETELDVVEGMQFDRGYLSQYMVTDNDKMEAVLDNPYLLITDKKISNIQDILPLLEQILQQSRPLLIIADDVDGEALPTLGLNKIRGTFHVVAVKALAFGDRRKAMLEDIAILTGGTVLTDDLGLELKDAPFETLGMAFKVVENKDIPRIVKGSGEKRTIERLVPLIKNPIGEPTSDFDREKLQERLVKLAGEVAVVKVEAATETELKELKLRIEDALNATRAAVEEGIVPGGGTAFVNVLPKFAEIDATGDEATGVKIVLRALEEPVRQIAENAGLEGSVIVDKLKQAQPGVGYNAKTDEWVNMIDAGIVDPTKVTRSALQNAASVSALLLTTEGVIADKPSN

SEQ ID NO: 8659 - protein, 340 aa, Brucella suis 1330
MTLVGNFSPLVLVGDSDRVEAETVGAYLDGWAGHDKVRLATANAIKAILSGAGRLVGRIARGYLPGDPGKLVGVNSDQDQQKSIDVGSHNLFVELLIAAGVASILSEEADLPVAGKADGLVAVAIDPLDGSGNVGLGAPLGTIFSIFPADVEEPFLQPGNRQIAAGYVSYGNSVDLGFSVGEGVIFATLDPVSGQFHITRRNVKLPERTSDLAFNASVQRHLSAGMQAYVNDAFLGKDGPRGRNFNMRWLGAAVGDMHRIMQRGGLFFYVNDSRPGYEKGRLRLVYEANPIAFLAREAGGKATDGSRPILDIVPQTYHERSALVFGVAEELDILGEYFVK

SEQ ID NO: 8660 - protein, 492 aa, Oryza sativa (japonica cultivar-group)
MDPYKHRPSSGSNSTFWTTNSGAPVWNNNSALTVGERGPILLEDYHLIEKLAQFDRERIPERVVHARGASAKGFFEVTHDISHLTCADFLRAPGVQTPVIVRFSTVVHERGSPETLREPRGFAVKFYTREGNFDLVGNNMPVFFIRDGMKFPDMVHAFKPSPKTNMQENWRIVDFFSHHPESLHMFSFLFDDVGIPLNHRHMEGFGVNTYTLINKDGKPHLVKFHWKPTCGVKCLLDDEAVTVGGTCHSHATKDLTDSIAAGNYPEWKLYIQTIDPDHEDRFDFDPLDVTKTWPEDIIPLQPVGRMVLNKNIDNFFAENEQLAFCPAIIVPGIHYSDDKLLQTRIFSYADTQRHRLGPNYLMLPVNAPKCAYHNNHHDGSMNFMHRDEEVNYFPSRFDAARHAEKVPIPPRVLTGCREKCVIDKENNFQQAGERYRSFDPARQDRFLQRWVDALSDPRITHELRGIWISYWSQCDASLGQKLASRLNLKPNM

SEQ ID NO: 8661 - protein, 552 aa, Wolbachia sp.
MANIVVSGEQLQEAFREVAAMVDSTVGATAGPRGNTVGISKPYGGPEVTKDGYKVMKGIKPEKPLHSAIVSTIAQSASQCNDKVGDGTTTCSILTSNMIMEASKSIAAGNDRICIKNGIQKAKDVILKEITSMSRTISLEKMDEVAQVAIISANGDKDIGNSIADAVKKVGKEGVITVEESKGSKELEVELTTGMQFDRGYLSPYFVTNNEKMSVELDDPYLLITEKKLNIIQPLLPILEAIFKSGKPLFIIAEDVEGEALSTLVINKLRGLKVAAVKAPGFGDRRKEMLEDIAALTGAKYVIKDELGIKMEDLTLEDLGTAKNVKITKDNTTIVSEDSDCDKQNRVNARINQIKSQIETSTSDYDKEKLRERLAKLSGGVAVLKVGGATEVEVKERRDRVEDALHATRAAIEEGIVPGGGVALLYAASALDKLKASSDEEQIGINIVKKVLSAPIKRLVKNAGLESAVIIDYLIKQNDKELIYNVEAMNYANASTAGVIDPAKVVRIAFETAVSVASALITTESMIVDLPNKEENASSPMGAGAMGGMGGF

SEQ ID NO: 8662 - protein, 115 aa, Zea mays
  misc_feature (106)..(106): Xaa can be any naturally occurring amino acid
HASSNTLDGLNGFDGTDTHYFHSGPRGHHWMWDSRLFNYGNWEVLRFLLSNARWWLEEYKFDGFRFDGVTSMMYTHHGLQVTFTGNFNEYFGFATDVDAVVYLMLXNDLIHGLYP

SEQ ID NO: 8663 - protein, 115 aa, Zea mays
  misc_feature (74)..(74): Xaa can be any naturally occurring amino acid
HASSNTLDGLNGFDGTDTHYFHSGPRGHHWMGDSRLFNYGNWEVLRFLLSNARWGLEEYKFDGFRFDGVTSMMXTHHGLQVTFTGNFNEYFGFATDVDAGVYLMLVNDLIHGLYP

SEQ ID NO: 8664 - protein, 303 aa, Synechococcus sp. CC9605
MVSSQTADTRELRQRAAVMSPRDRLPARQRKFKMGTTSFMLVMHVLATVALLPHFWSWQGVVAFGVLYWLTVLGVTLGLHRLVAHRSLVVPVWVERILVLMGTLACQSGPIEWVGLHRHHHRFSDQPTDHHDAGRGLWWAHSEWMLHDIPALKELDRYAGDLQCDPFYRWLDRWFLLLQIPLGLGLYWFGEAAQVHGGGLGLVLWAIPLRLVVVYHVTWLVNSATHAFGYRNFDCPDLSRNCWWVALLSFGEGWHNNHHAHPASARHGLRWFEFDLTWQHVRLLKRLGLASRIRTARYVPGAS

SEQ ID NO: 8665 - protein, 115 aa, Zea mays
  misc_feature (100)..(100): Xaa can be any naturally occurring amino acid
  misc_feature (106)..(106): Xaa can be any naturally occurring amino acid
HASSNTLDGLNGFDGTDTHYFHSGPRGHHWMWDSRLFNYGNWEVLRFLLSNARWGLEEYKFDGFRFDGVTSMMYTHHGLQVTFTGNFNEYFGFATDVDAXVYLMLXNDLIHGLYP

SEQ ID NO: 8666 - protein, 722 aa, Aspergillus nidulans FGSC A4
MRALGLVGLVGVANAVCPYMTGELGRRDTNPDATEATEEFLSEYYLDDTDSYLTTDVGGPIEDQQSLKAGARGSTLLEDFIFRQKIQRFDHERVPERAVHARGAGAHGVFTSYGDFSNITAASFLSAEGKETPVFVRFSTVAGSRGSSDLARDVHGFATRFYTDEGNFDIVGNNIPVFFIQDAIQFPDLIHAVKPKGDREIPQAATAHDAAWDFFSQQPSTLHTLLWAMAGHGIPRSFRHVDGFGVHTFRLVTEDGSTKLVKFHWKTLQGLASMVWEEAQQISGKNPDYMRQDLFESIEAGRYPEWELNVQIMDEEDQLRFGFDLFDPTKIVPEEYVPLTPLGKMTLNRNPRNYFAETEQVMFQPGHVVRGVDFTEDPLLQQGRLFSYLDTQLNRNGGPNFEQLPINQPRVAIHNNNRDGAGQMFIPLNPDAYSPNTLKGSTLKQANQTAGRGFFTAPDRTANGNLVRAKSSTFDDAWSQPRLFWNSLLPAEKQFVVNAIRFENANVKSDVVKNNVIVQLNRISNDLATRVAKAIGVDAPEPDNTYYHDNTTSNIGAFGHRLQSLAGLKIAVLASVDAEESFSAATALKAELSNDNLDVIVVAERFSNGVNQTYSASDAIQFDAVVVAPGAEKLFGAKSAANSSSTLYPAGRPLEILVDAFRFGKPVAALGSGSTAFDNAGINTAVEGVYVADAVDESFANNLEEGLTVFKFLDRFALDSDE

SEQ ID NO: 8667 - protein, 245 aa, Aleurites moluccana
ALSIAGAVQSQKLAVRAISRLQSLPGGDIKLLCDTVVECVKELTGYDRVMVYKFHEDEHGEVVAESKRPDLEPYIGLHYPSADIPQASRFLFKQSRVRMIVDCHATAVSVIQDEALMQPLCLVGSTLRAPHGCHAQYMANMGSIASLAMAVIINGNDEEAIGGRNSMRLWGLVVCHHTSARSIPFPLRYACEFLMQAFGLQLNMDLQLASQFSEKHVLRTQALLCDMLLRDSPTGIVTQSPSIMD

SEQ ID NO: 8668 - protein, 115 aa, Zea mays
  misc_feature (32)..(32): Xaa can be any naturally occurring amino acid
  misc_feature (45)..(45): Xaa can be any naturally occurring amino acid
  misc_feature (55)..(55): Xaa can be any naturally occurring amino acid
  misc_feature (64)..(64): Xaa can be any naturally occurring amino acid
  misc_feature (100)..(100): Xaa can be any naturally occurring amino acid
  misc_feature (106)..(106): Xaa can be any naturally occurring amino acid
HASSNTLDGLNGFDGTDTHYFHSGPRGHHWMXDSRLFNYGNWEVXRFLLSNARWXLEEYKFDGXRFDGVTSMMYTHHGLQVTFTGNFNEYFGFATDVDAXVYLMLXNDLIHGLYP

SEQ ID NO: 8669 - protein, 245 aa, Goupia glabra
ALSIAGAVQSQKLAVRAISQLQSLPGGDIKVLCDTVVESVRELTGYDRVMVYKFHEDEHGEVVAENKRPDLEPYIGLHYPSTDIPQASRFLFKQNRVRMIVDCHATPVRVIQDKGLMQPLCLVGSTLRAPHGCHAQYMANMGPTASLAMAVIITGNDEEAIGGRNSMRLWGLVVCHHTSARCIPFPLRYACEFLMQAFGLQLNMELQLASQLSEKRVLRTQTLLCGMLLRDSPTGIVTQSPSIMD

SEQ ID NO: 8670 - protein, 544 aa, Chlamydia trachomatis D/UW-3/CX
MVAKNIKYNEEARKKIQKGVKTLAEAVKVTLGPKGRHVVIDKSFGSPQVTKDGVTVAKEVELADKHENMGAQMVKEVASKTADKAGDGTTTATVLAEAIYTEGLRNVTAGANPMDLKRGIDKAVKVVVDQIRKISKPVQHHKEIAQVATISANNDAEIGNLIAEAMEKVGKNGSITVEEAKGFETVLDIVEGMNFNRGYLSSYFATNPETQECVLEDALVLIYDKKISGIKDFLPVLQQVAESGRPLLIIAEDIEGEALATLVVNRIRGGFRVCAVKAPGFGDRRKAMLEDIAILTGGQLISEELGMKLENANLAMLGKAKKVIVSKEDTTIVEGMGEKEALEARCESIKKQIEDSSSDYDKEKLQERLAKLSGGVAVIRVGAATEIEMKEKKDRVDDAQHATIAAVEEGILPGGGTALIRCIPTLEAFLPMLTNEDEQIGARIVLKALSAPLKQIAANAGKEGAIIFQQVMSRSANEGYDALRDAYTDMLEAGILDPAKVTRSALESAASVAGLLLTTEALIAEIPEEKPAAAPAMPGAGMDY

SEQ ID NO: 8671 - protein, 447 aa, Zea mays
  misc_feature (141)..(141): Xaa can be any naturally occurring amino acid
  misc_feature (256)..(256): Xaa can be any naturally occurring amino acid
MSAAATKVKRRVGKYELGRTIGEGTFAKVRFAKNTETGEPVAVKILDKEKVLRHKMAEQIKREISTMKLIKHPNVVRIYEVMGSKTKVYIVLEYVTGGELFDTIANQGRMREGEARSYFQQLINAVDYCHSRGVYHRDLKXNLLLDSYGNLNVSDFGLSALSQQIKDDGLLHTTCGTPNYVAPEVLEDQGYDGAMADLWSCGVILFVLLAGYLPFEDSNLMTLYKKISNAEYTFPPWTSFPAKRLNLLTRLVEQSXENSCDFRITIPEILEDEWFKKGYKRPEFDEKYDTPLDDVDAVFNDSEEHHVTEKKEEEPVALNAFELISRSAGLNLGNLFDSEQEFKRETRFTSKCPPKEIIRKIEEAAKPLGFGVQKKNYKLRLEKVKAGRKGNLNVATEILQVAPSLHMVQVRKAKGDTLEFQKFYKNLSKTLKDVVWKSEDLQMRAAS

SEQ ID NO: 8672 - protein, 245 aa, Goupia glabra
ALSIAGAVQSQKLAVRAISQLQSLPGGDIKVLCDTVVESVRELTGYDRVMVYKFHEDEHGEVVAENKRPDLEPYIGLHYPSTDIPQASRFLFKQNRVRMIVDCHATPVRVIQDKGLMQPLCLVGSTLRAPHGCHAQYMANMGSTASLAMAVIITGNDEEAIGGRNSMRLWGLVVCHHTSARCIPFPLRYACEFLMQAFGLQLNMELQLASQLSEKRVLRTQTLLCDMLLRDSPTGIVTQSPSIMD

SEQ ID NO: 8673 - protein, 220 aa, Populus tremuloides
MVRGKTQMRRIENATSRQVTFSKRRNGLLKKAFELSVLCDAEVALIVFSPRGKLYEFASSSMQETIERYRRHVKENNTNKQPVEQNMLQLKEEAASMIKKIEHLEVSKRKLLGECLGSCTIEELQQIEQQLERSVSTIRARKNQVFKEQIELLKQKEKLLAAENARLSDECGAQSWPVSWEQRDDLPREEQRESSSISDVETELFIGPPETRTKRIPPRN

SEQ ID NO: 8674 - protein, 104 aa, Quercus suber
SLDIWDPFDGLFTSVRETSSFSNVRIDWKETPEAHVFKADLPGLKKEEVKVEVEEGRVLQISGERSKEQEEKNEKWHRVERSSGKFLRRFRLPQNAKIDEVKAS

SEQ ID NO: 8675 - protein, 245 aa, Afrostyrax sp. Cheek 5007
ALSIAGAVQSQKLAVRAISQLRSLPGGDIKLLCDTVVESVRELTGYDRVMVYKFHEDEHGEVVAESKRSDLEPYLGLHYPATDIPQASRFLFKQNRVRMIVDCNAMPVPVSQDEGLMQPLCLVGSTLRAPHDCHAQYMANMGSIASLAMAVIINGNDDEAIGGRNSMRLWGLVVCHHTSARCIPFPLRYACEFLMQAFGLQLNMELQLASQLLEKHVLRTQTLLCDMLLRDSPTGIVTQNPSTMD

SEQ ID NO: 8676 - protein, 110 aa, Quercus suber
SLDVWDPFEGFAQLSSHSNFPSETSSFAAAKVDWKETPNAHVFKADVPGLKKEEVKVEIEEGRVLQISGERSQEQEEKSDTWHRVERSSGRFSRRFRLPENAKVEEVKAA

SEQ ID NO: 8677 - protein, 245 aa, Afrostyrax sp. Cheek 5007
ALSIAGAVQSQKLAVRAISQLQSLPGGDIKLLCDTVVESVREHTGYDRVMVYKFHEDEHGEVVAESKRSDLEPYLGLHYPATDIPQASRFLFKQNRVRMIVDCNAMPVPVSQDEGLMQPLCLVGSTLRAPHDCHAQYMANMGSIASLAMAVIINGNDDEAIGGRNSMRLWGLVVCHHTSARCIPFPLRYACEFLMQAFGLQLNMESQLATQLVEKHVLRTQTLLCDMLLRDSPTGIVTQNPSTMD

SEQ ID NO: 8678 - protein, 297 aa, Zea mays
MDWGNRTKAAAAAAAPDERAGGGEGLGGYVKVMTDEQMEVLRKQISIYATICEQLVEMHRVLTEHQDTIAGGLLGSVCYLTMVITGLRFSNLYCDPLIIPGGHKITARQRWQPTPMQLQILESIFDQGNGTPSKQKIKEITAELSQHGQISETNVYNWFQNRRARSKRKQAAASLPNNAESEAEADEEPLADKKPKSDRPPPPPPPIQDNTKATGALSADRVSGGTRHLDTGHDQTSGVMYGCNDSGLLRSSGSSGQMSLYENFMSNPRIDRFPAKVESSRSFPHLQQHGEGFGMFG

SEQ ID NO: 8679 - protein, 838 aa, Bdellovibrio bacteriovorus HD100
MGSASFLKNLLTRFGVEFGLMGLIGLGFLTFQRPELLKLSQYSERPSNEMTEVLRTTEQILVRAEAAQDRFLVSRQPTDLQSYNSEITALNGQLARMSQLVRNKPREHAMAVKLGHLIRAHIETANTQVMTPQRRPAQTEESLDKTRYQIRHQLIEMQAASAPAIKFKPTKEGQNFLLGLCAAIVLIIASRVLQRKEQHETRKAVEALQGKSILLDTILNSMSEALIVVDQNGWFTHYNAAAQRIIGSKIKEISTDSSVEQLGFFNQAEGRPFTRKELPLYRALSGDRVDDLEIFVQNSEHPEGIYISLSSRPLNDIDGGISGALIVFKDISRRKMVEQEWIRAREAALEASQKKSDFLAAMSHEIRTPMNGVIGMTTLLADTHLNPEQTDYVGNIKRSAESLLMLINDLLDHSKIEAGKIRLDPQPLDLQFLVEDVLEMFKPTVAEKNIGLECRFDGKNLWHYRADAGRLRQILVNLMGNAVKFTEKGFVRLEVSSRGDKDGKTALLFEVKDTGQGLQEHEKRSLFQKYFQAKAGMKFGGTGLGLSICKQLVDLMGGDIGVESVPGVGSNFWFMVNLEECAGEVQPQSSEVRFARIFSGHVLVAEDQIVNQRVAESYLTKLGLKVEIAGNGQIALEKARSKSYDLIFMDCQMPVLNGYEATKQLRLLENTLGRKTPVVALTAEGTSGERKSCYEAGMDDFLTKPLELHKLIETLHRWLKPSEKNLDLKALESLKDLVSHDRSLTEVLIEDLEQSGPVLLHEIREGIESRNLEKVSESAHALKSSAATLGAKQVSELCQKLEDLQDFTEAEFLLKQTERKFFESLSELKTYSSRVRAA

SEQ ID NO: 8680 - protein, 105 aa, Arabidopsis thaliana
MDPLLWDQLASHSTAFAVEQFSDGVGYSWIDGLKDHAAQNVNDKMMSNAGHIFPHNTPNTKEAYYYRMIFERFFPQNSARLTVPGGATVACSTAKAEDQLAFHST

SEQ ID NO: 8681 - protein, 250 aa, Triticum aestivum
SPTRAPASASPRTTPSSSRYARVELPRYRMPENSIPKETAYQMITDELMLDGNPRLDLASFVTTWMEPECNKLIMDSINKNYVDMDEYPVTTELQNRCVNMIAHLFNAPINEDEKAIGVSTVGSSEAIMLAGLAFKRKWANKRKEEGKPYDKPNIVTGANVQVCWEKFARYFEVELKEVKLTEGYYVMDPLKAVEMVDENTICVAAILGSTLTGEYEDVKLLNDLLVGKNKETGYAFYLLAVVSQFGKLP

SEQ ID NO: 8682 - protein, 158 aa, Triticum aestivum
  misc_feature (58)..(58): Xaa can be any naturally occurring amino acid
MSLIRRSNVFDPFSLDFFDPFEGFPFGSGNSGSGSLVPRTSSDTAAFAGARIDWKETXPEAHVFKADVPGLKKEEVKVEVEDGNILQISGERNKEQEEKTDTWHRVERSSGKFLRRFRLPENAKAEQVKASMENGVLTVTVPKVEAKKPEVKSIHISG

SEQ ID NO: 8683 - protein, 526 aa, Bdellovibrio bacteriovorus HD100
MERVGRAEVLSSPRFFIISLMVLVLGASLYLVRLSGKDVSKVKSGEDYWAETGLGPAALEDLLQDQTCGSSERYFLACANAILTVANRYNLSLNLQGELVPVHEALSADMSSEKKQLEPWKEYFTSQTAKATQISFLKAWEQLKSEYIKPKQSSMMVGLGLNGFISVFRDPHTYFMPVNQFQEVISRADSRSVTLGITLGSHKGQYVVRKLTEGSPAKLSGIQKGDVLISINDTSVKGLMQPRVSELLKGEVGDVVRIRVERDGEAMKFRLRRQEITVATVSTRVIEGIKPIAVIGINKFARGACEKVKESLEIVKRSHVRGLLLDLRDNPGGQMEEAACIASLFVGPENKIFEVRYLDPSKKAEVFYGGEEKHFDMPMAVLVNAASASASEIVAGALRDLNRAVLVGERTFGKGSFQEGEYWSQNKKIALFETKGFYYLPSGRSPQMKGLEPDVAVNFEEISVVREAEQFINPLRAPERQVRAMAQSMSSSECLDLEDGSPSDDLQLTKARQVLFCTKAVARAGL

SEQ ID NO: 8684 - protein, 498 aa, Oryza sativa
KGLDCTVILSSLSNKKRWKKQLMEEFELQQQPYYSKLLLGSPLEIANVDDSDLQLVAGVPSDPPPAPPTAVKKKKKRSLPGTPDPSAEVVALSPRTLLATNRFVCEICGKGFQRDQNLQLHRRGHNLPWKLRQRGGAGGGGGGEPPRKRVYVCPEASCVHHSPSRALGDLTGIKKHFCRKHGEKKWKCDRCGKRYAVHSDWKAHSKVCGTREYKCDCGTVFSRRDSFVTHRAFCDALAQENNKLAQPMNMAAVTSALQGQQQAHHPVADDDDAAGVKSPHLKMFPDVDNIVAAATAGNPLLPPPLSMAGCMLSSLAAPLSSPFLPGCKLGVDAARDAAMVFPPPPPPAGSAAAIMSATALLQKAAELGATTSTGCYGGVAFPAMGIAGGLDRLPAIGHHLAPYDDVVVPAALQGQTATQLVGFDLGGLLPGQLYGGGGGAMTRAIGSLMHGGDQHAGVVDRRRGEGVRVVDYMGVDDDDDHGCFDGVGPFGPHIGPWA

SEQ ID NO: 8685 - protein, 251 aa, Wigglesworthia glossinidia endosymbiont of Glossina brevipalpis
MNLVSISINEDNYIWLLYNNDKNCIIVDPGEFISIHNICKKKKLTPVAIFLTHHHHDHVDGVESLKTYFNTPVYGPKETIKYGTTKIVKEGDEIFLLNKCFKVFELPGHTLGHVGFYSPPWFFCGDTLFSAGCGRLFEGSAKDMYFSIKKINSLPPNTLICAGHEYTLQNLNFAISVFPKNTILSMYKKKVEKLNFYKKPTLPSALYLERQINIFLNPYNFEFKGELKRLLLQEEWVLFKKLRDMKNNFIY

SEQ ID NO: 8686 - protein, 260 aa, Listeria monocytogenes str. 4b H7858
MPRLGFGVWKVQDGDEAVNSVKWAIEAGYISIDTAAAYKNEEGVGQAIKESGVKREDLFVTTKLWNAEQGYESTLAAFDESLRKLELDYVDLYLIHWPVKGKFKDTWRAFEKLYKDKRVRAIGVCNFHEHHLKELMEDAEIAPMVNQIELHPQLTQEPLRKFCAENNIVVEAWSPLGNGKLLSNPEIKAIADAHGKSVAQVILRWDLQIGVVTIPKSVHQERIIQNADIFDFELSEEEVAKISGLNKDERTGPDPDNFNF

SEQ ID NO: 8687 - protein, 471 aa, Legionella pneumophila str. Lens
MTIALVWFRQDLRLTDNPAFIEACSHHEIVIPLYIYDDKCSVLGQAQAWWLHHSLIALGKSLNQQGLCLVLRKGAPQEIILELVAQYGVESVYWNRCYEPQAIARDKKIKLALGEREIKVQSFNGNLLHEPWTIKNKNGDFFKVFTPYWKQCRQILNIPSPFMLTKRPRGIKITSDDLGKWKLLPAINWAARFSEYWTPGEEGAQKKLDEFIVHHLSGYKRERDFPAKNATSRLSPHLHFGEISPWVILRALELAKLEQTCDLASVEHFLSELGWREFSVYLLYHFPKLDCENFRKEFDAFPWQNDEQLLTCWQKGMTGYPIIDAGMRELWATGYMHNRVRMIVASFLTKDLLIDWRSGAQWFLDTLVDADLANNSASWQWVAGCGADAAPYFRIFNPVLQSQKFDPDGVYIRQWIPELAQLNSQSIHQPWTDADASSIFLGKKYPKPIIDHQEARTKALSYYQQIKKGMD

SEQ ID NO: 8688 - protein, 81 aa, Oryza longistaminata
YVKFHWKPTCGVSCLMDDEATLVGGKNHSHATQDLYDSIAAGNFPEWKLFVQVIDPEEEERFDFDPLDDTKTWPEEEVPLR

SEQ ID NO: 8689 - protein, 90 aa, Oryza longistaminata
DAKARYVKFHWKPTCGVSCLMDDEATLVGGKNHSHATQDLYDSIAAGNFPEWKLFVQVIDPEEEERFDFDPLDDTKTWPEEEVPLRPVGR

SEQ ID NO: 8690 - protein, 90 aa, Vernonia galamensis
REQDRFMPIANVIRIMRKILPPHAKISDDAKETIQECVSEYISFVTGEANDRCQREQRKTITAEDVLWAMSKLGFDDYIEPLTVYLHRYR

SEQ ID NO: 8691 - protein, 115 aa, Zea mays
  misc_feature (55)..(55): Xaa can be any naturally occurring amino acid
HASSNTLDGLNGFDGTDTHYFHSGPRGHHWMWDSRLFNYGNWEVLRFLLSNARWXLEEYKFDGFRFDGVTSMMYTHHGLQVTFTGNFNEYFGFATDVDAGVYLMLVNDLIHGLYP

SEQ ID NO: 8692 - protein, 89 aa, Oryza longistaminata
DAKARYVKFHWKPTCGVSCLMDDEATLVGGKNHSHATQDLYDSIAAGNFPEWKLFVQVIDPEEEERFDFDPLDDTKTWPEEEVPLRPVG

SEQ ID NO: 8693 - protein, 90 aa, Argemone mexicana
  misc_feature (75)..(75): Xaa can be any naturally occurring amino acid
REQDRYMPIANVIRIMRKVLPTHAKISDDAKETIQECVSEYISFITSEANDRCQREQRKTITAEDVLWAMSKLGXDEYIEPLTLYLQRYR

SEQ ID NO: 8694 - protein, 115 aa, Zea mays
  misc_feature (100)..(100): Xaa can be any naturally occurring amino acid
HASSNTLDGLNGFDGTDTHYFHSGPRGHHWMWDSRLFNYGNWEVLRFLLSNARWWLEEYKFDGFRFDGVTSMMYNHHGLQVTFTGNFNEYFGFATDVDAXVYLMLVNDLIHGLYP

SEQ ID NO: 8695 - protein, 543 aa, Streptococcus pyogenes SSI-1
MAKDIKFSADARAAMVRGVDMLADTVKVTLGPKGRNVVLEKAFGSPLITNDGVTIAKEIELEDHFENMGAKLVSEVASKTNDIAGDGTTTATVLTQAIVHEGLKNVTAGANPIGIRRGIETATATAVEALKAIAQPVSGKEAIAQVAAVSSRSEKVGEYISEAMERVGNDGVITIEESRGMETELEVVEGMQFDRGYLSQYMVTDNEKMVADLENPFILITDKKVSNIQDILPLLEEVLKTNRPLLIIADDVDGEALPTLVLNKIRGTFNVVAVKAPGFGDRRKAMLEDIAILTGGTVITEDLGLELKDATMTALGQAAKITVDKDSTVIVEGSGSSEAIANRIALIKSQLETTTSDFDREKLQERLAKLGGGVAVIKVGAPTETALKEMKLRIEDALNATRAAVEEGIVAGGGTALITVIEKVAALELEGDDATGRNIVLRALEEPVRQIALNAGYEGSVVIDKLKNSPAGTGFNAATGEWVDMIKTGIIDPVKVTRSALQNAASVASLILTTEAVVANKPEPAAPAPAMPAGMDPGMMGGF

SEQ ID NO: 8696 - protein, 558 aa, Leptospira interrogans serovar Copenhageni str. Fiocruz L1-130
MNTSNNHSVPIPLNETARLRALHSYQILDTASEEKFDSLTQIAAYICNSSMALISLVDTNRLWFKSKLGMQESEAPRKISFCQYAIMKDDLLEIEDALENEIFKNKPSVLGPPYIRFYVGAPLKTPDGFNIGTLCVFDSQPKHLNPKQRVILKALSNQIIYNFELNKKNIELLLIQKKEEELQKSKSLFFANMSHEIRTPVHGILGVSGLLSETELQQEQKEYVDTIQRSGKLLLNLLNDILDFSKLESFNMKIEIIAFDLIDLLKDVFHLFEADAKRKNIEFKLVGKQPSHSIVSTDPHRFKQILVNLISNAIKFTEKGSVLIEFDFKSDLKHCDIQIRIKDTGVGIPEQKLKELFQAYRQVDTSVSRKYGGTGLGLSISKNLSEMMNLKLTARSIINQGSVFEISGQIPLAEKSEVNFEPKKATQNIEIQNLNILVAEDNETNQMLIKKILEKLGYKPVIVSNGIEALHHIKMYKTDVLFLDIQMPELNGIEAAKILTQQNDSSIRPYIIAMTANASQTDKEDCMASGIDQYLSKPFHKEEIADLLNQFISHKTTN

SEQ ID NO: 8697 - protein, 410 aa, Aspergillus nidulans FGSC A4
MPPGLPTTMTETRLFKPIKIGTVQVQHRIGMAPLTRLRANPDRTPTSLMKEYYTQRASVPGTLIITEGTLISTASAGAFPGAPGIWRADQVAAWKEITDAVHKRGSFIYVQLFSMGRAAEKKLAESEGIEVVAPSAIPIPYDEKPDAPIPRAMSVAEIQQTIVDFVKASKDALTAGFDGVEIHGANGYLLDQFLQDTSNQRDDEYGGSVANRSRLLHQVLQKVAKAIGADKVGLRLSPWSRFQGMRMDDPIPQFADIIDKASDLNLAYLSLIEARVFGARDYEGSLDGDKETLDFVYERWHGPVLVAGGYELEKARRLVDEQYPKKDIVVLFGRHFISNPDLVYRFKEGVELTKYQRETFYEIRSAVGYVDYPFSKEYSATINLAGSRVGRLSDLRKCGSPGLDFSSSKS

SEQ ID NO: 8698 - protein, 115 aa, Zea mays
  misc_feature (100)..(100): Xaa can be any naturally occurring amino acid
HASSNTLDGLNGFDGTDTHYFHSGPRGHHWMWDSRLFNYGNWEVLRFLLSNARWGLEEYKFDGFRFDGVTSMMYTHHGLQVTFTGNFNEYFGFATDVDAXVYLMLVNDLIHGLYP

SEQ ID NO: 8699 - protein, 245 aa, Reinwardtia trigyna
ALSIAGAVQSQKLAIRAISQLQSLPGGDIKLLCNTVVDCVRELTGYDRVMVFKFHEDEHGEVVAENKRADLEPYLGLHYPATDVPQASRFLFKQNRVRMIVDCHASAVRVVQDEGLVQPLCLVGSTLRAPHGCHAQYMANMGSIASLAMAVVITGNDEEGTGGRNSTRLWGLVVCHHTSARCIPFPLRYACEFLMQAFGLQMNVELQLASQLLEKHVMRTQTLLCDMLLRDSPTGIVTQSPSIMD

SEQ ID NO: 8700 - protein, 365 aa, Averrhoa carambola
ALSIAGAVQSQKLAVRAISQLQLLPGGDIKLLCDTVVESVRELTGYDRVMVYKFHEDEHGEVVAESKRPDLEPYIGLHYPATDIPQASRFLFKQNRVRMIVDCNAKPVRVIQDEGLMQPLCLVGSTLRAPHGCHAQYMANMGSIASLAMAVIINGNDEEAIGGRNSMRLWGLVVCHHTSARCIPFPLRYACEFLMQAFGLQLNMELQLASQLSEKHVLRTQTLLCDMLLRDSPTGIVTQSPSIMDLVKCDGAALYYQGKYYRLGVTPTEAQIKDIIEWLLAFHGDSTGLSTDSLADAGYPGATSLGDAVCGMAVAYITKTDYLFWFRSHTAKEIKWGGAKHHPEDKDDGQRMHPRSSFKAFLEVV

SEQ ID NO: 8701 - protein, 365 aa, Averrhoa carambola
ALSIAGAVQSQKLAVRAISQLQLLPGGDIKLLCDTVVESVRELTGYDRVMVYKFHEDEHGEVVAESKRPDLEPYIGLHYPATDIPQASRFLFKQNRVRMIVDCNAKPVRVIQDEGLMQPLCLVGSTLRVPHGCHAQYMANMGSIASLAMAVIINGNDEEAIGGRNSMRLWGLVVCHHTSARCIPFPLRYACEFLMQAFGLQLNMELQLASQLSEKHVLRTQTLLCDMLLRDSPTGIVTQSPSIMALVKCDGAALYYQGKYYRLGVTPTEAQIKDIIEWLLAFHGDSTGLSTDSLADAGYPGATSLGDAVCGMAVAYITKTDYLFWFRSHTAKEIKWGGAKHHPEDKDDGQRMHPRSSFKAFLEVV

SEQ ID NO: 8702 - protein, 262 aa, Nitrosomonas europaea ATCC 19718
MINVFPVRAFRDNYIWIVHNQQFALIIDPGDATPVLTWLRQQKLQPIAILCTHHHHDHTGGISLLVQKFEIPVYGPASEKIPGMTHPLAEGDTLVFPELSLELSILDVPGHTAGHIACHGQNRLFCGDTLFACGCGRIFEGNAQQMFDSLQKLTDLPDETQVYCAHEYTLDNIRFARAIDPDNPELIELESNVEEKREQNMPTLPSSLAAEKATNPFLRCNQPAIIQSASRYAGRQLTDPVSVFAAIRDWKNNFRGNTDLPM

SEQ ID NO: 8703 - protein, 360 aa, Acanthothamnus aphyllus
AVQSQKLAVRAISHLQSLPGGDIKLLCATVVDSVRDLTGYDRVMVYKFHEDEHGEVVAESKRPDLEPYIGLHYPATDIPQASRFLFKQNRVRMIVDCRASPVGVRQDDGLMQPLCLVGSTLRAPHGCHAQYMENMGSKASLAMAVIINGNDEESIGGRNATRLWGLVVCHHTSARCIPFPLRYACEFLMQAFGLQLNMELQLAAQLSEKHVLKTQTLLCDMLLRDSPTSIVTQSPSIMDLVKCDGAALYYQGKYYPLGVTPAEAQIKDIVEWLLAFHGDSTGLSTDSLGDAGYPGAALLGNAVCGMAVAYITNRDFLLWFRSHTTKEIKWGGAKHHPEDKDDGQRMHPRSSFKAFLEVVK

SEQ ID NO: 8704 - protein, 727 aa, Xylella fastidiosa Ann-1
MRLRILNSLKVALLTLAITTAPALMAKSDSASPQVATPDQTTATKLVYGLLSDSRYAYRLRPLDEAMSKDIFKRYLEALDSNKQFFTEADIDNFSAFKAEIPDSIRNGNLKPAFSIFAVYKKRVAERVTYANQLLKQNFDFSGQEKYEYDRSKAPWPASPQDLDDIWRRSTMNDWLRLKLAGKKPEDIRKTLKKRYANLLKTVNELKGEDVFQLYLNAYTNSIDPHTDYFTPRTADAFNQQMSLSLEGIGAQLQKQEDMVIIREVIPGGPTALDGTLKPGDRIVGVGQGKGGPIEDVIGLRIDDVVSKIRGKKDTQVRLEYIPAESGIDGAHRIVTLTRQKVRLAEQAAKGETITIEGSNGDAQRRIGIIKLPTFYEDFEGRRRNVANYTSATRDVAKLLTNFKTDKVDGVVLDLRNNGGGSLDEAIQLTGLFIEQGPVVQVRESGGRVTVNGDRDDKVTWDGPLAVLINRGSASASEIFAGAIQDYGRGLVIGETSFGKGTVQNIVDLDRWPANESRRFGQVKLTIAQFFRISGSSTQHKGVLPDIAFPASVGATEFGESTYENALPWTRIASLQHTQYGNFSPILSKLKKIHISRTANDIEFKWWQEDVHNFSLEKEKKYVILNEAERLAERRKQETQHRERQTIRKNLGLQLDPLSEESDDGLIGNERDIAKDTAREKLADKRPDPLLHESAAILTDTINLLEKDQILSAQVLLQSTTPGHWAN

SEQ ID NO: 8705 - protein, 316 aa, Brassica oleracea
MAEKPAPEQEQEQTRAMEPAVLDDIIRRLVEFRNTRPGSGKQVHLSEGEIRQLCAVSKDIFLQQPILLELEAPIKICGDIHGQYSDLLRLFEYGGFPPDANYLFLGDYVDRGKQSLETICFLLAYKIKYPENFFLLRGNHECASINRIYGFYDECKRRFNVRLWKIFTDCFNCLPVAALIDRILCMHGGISPELMSLDQIRSISRPLDIPDSGLVCDLLWSDPSGDVKGWGANDRGVSYTFGADTVAEFLQKNDMDLICRAHQVVEDGYEFFAERQVVTVFSAPNYCGEFDNAGAMMSIDESLMCSFQILKPSEKK

SEQ ID NO: 8706 - protein, 727 aa, Parachlamydia sp. UWE25
MMTMQQTEFDSQFNEHIYRIVHVVHHQPHAFLGLHSFFEGSKVIRLWRPNAQQIFLELFGNIVEARRIHEMGIFECIVPSHTTAIDYKIFHQNGKLHFDPYAFLPTFGEVDQYLFGKGVHYELYHQMGGRLATHQGIQGVKFAVWAPNAKSVSLIADFNHWDGKVNPMRIMGYSGVWELFVPGLQEGEKYKFEIHTQQGERILKSDPYALSSELRPATASKIANIERFQWQDQAWMEQRKAKNWTSLPMNIYEVHLGSWKKKDSNSEFLNYRELAHELTAYCLDMGFTHIELLPIQEHPLDESWGYQVSGFYAPTSRFGHPEDFQYFVNYLHQHQISLILDWVPGHFPTDAFSLARFDGSALYEHADPRQGYHPHWHTNIFNFGRHEVSNFLIANALYWLEIMHVDGLRVDAVASMLYLDYGREENEWIPNDVGGKENLQAIEFLKHLNSIVHSKCPGSLMIAEESTSFTGVTHSVEKGGLGFDLKWNMGWMNDTLRYFSKDMLFRNYHHHDLTFGLVYAFSEKFISVFSHDEVVHGKKSLLSKMPGDMWQQFANLRLLISYMICQPGKKLLFMGAEIGQWNEWNCKSGLEWFLLQFPTHAGIHKFVQEINHFYLKQPALWQKDFSHESFEWVDFADMHNSVISYVRKGGTERLLCVHNFTPLYHSDYILHLSQFEHIEEIFNSDAEKFGGSGKHNLNPEIIRNEARSVIGLRLILAPLATLIFKLS

SEQ ID NO: 8707 - protein, 713 aa, Agrobacterium tumefaciens str. C58
MARKPNSTSSITATIHDQQLIRGAGGELHQIATGDEPVLTTAQGAPVADDQNSLRIGPRGPLVVDDFHFREKIFHFDHERIPERVVHARGYGAHGYFETYDSLATHTKADLFQRAGERTPAFVRFSTVAGNKGSADLARDVRGFAVKLYTKEGNWDLVGNNIPVFFIQDAIKFPDLVHAAKQEPDRAFPQAQTAHDTFWDFISLTPESMNMVMWIMSDRTIPRSFRFMEGFGVHTFRFINAKEQSTFVKFHWKPKLGLQSVAWNEAVKINGADPDFHRRDLWTAIQSGNFPEWELQVQLFDQDFADSFDFDVLDPTKIIPEEILAPKPVGRLVLDRMPDNFFAETEQVAFMTQNVPPGIDFSNDPLLQGRNFSYLDTQLKRLGGPNFTHLPINAPKCPFAHFQQDGHMAMRNPTGRANYQPNSFGEGQRESPTRGFQHFAAEEQGVKARLRPESFADHYSQARQFYISQTPPEQRHIASALTFELSKVETVEIRERMVSHLLNIDETLATTVAQKLGLQTMPEPANTAIPTRQDLEPSPALSIVERGPKRFEGRKLGILITDGVDAKLLKGLTQAVTAEKAVFEFIAPKVGGVTASNGTLIEAHHMIDGGPSVLFDAVALLTSEAAIAELTEEATARDFVADAFQHCKFIGYDRSALPLLEIAGIADAMDEGVLPLPGEEGLAAFVAELGKLRVWAREPSLKLGKASVPVNKE

SEQ ID NO: 8708 - protein, 492 aa, Cucurbita pepo
MDPYRHRPSSAFNAPFWTTNSGAPVWNNNSSMTVGPRGPILLEDYHLVEKLANFDRERIPERVVHARGASAKGFFEVTHDITNLSCADFLRAPGVQTPVIVRFSTVIHERGSPETLRDPRGFAVKFYTREGNFDLVGNNFPVFFIRDGMKFTRHVHPLKPNPKSHIQENWRILDFFSHHPESLNMFSFLFDDIGIPQDYRHMDGSGVNTYTLINKAGKAHYVKFHWRPTCGVKSLLEEDAIRVGGSNHSHATQDLYDSIAAGNYPEWKLFIQTIDPDHEDKYDFDPLDVTKTWPEDILPLQPVGRMVLNKNIDNFFAENEQLAFCPAIIVPGVYYSDDKLLQTRIFSYADTQRHRLGPNYLQLPANAPKCAHHNNHHEGFMNFMHRDEEVNYFPSRFDPSRHAERYPHPPAVCSGKRERCIIEKENNFKEPGERYRSWTPDRQERFVRRWVDALSDTRVTHEIRSIWISYWSQADRSLGQKLASHLNVRPSI

SEQ ID NO: 8709 - protein, 89 aa, Oryza longistaminata
DAKARYVKFHWKPTCGVSCLMDDEATLVGGKNHSHATQDLYDSIAAGNFPEWKLFVQVIDPEEEERFDFDPLDDTKTWPEDEVPLRPVG

SEQ ID NO: 8710 - protein, 856 aa, Vigna radiata
MVYTISGIRFPVVPSLNVSSLRGDRRAASLPVFLRKNDFSRKILAVKSSHDSDSPSSAIAESDKVLIPQDQDNSASLTDQLETPVITSEDAHNLEDLTMEDEDKYSISEADTSYRQIEGELGSVVSVGKKVNIPSDEAKPKTIPRPGAGQKIYEIDPSLLAHREHLDFRFGQYKRLHDEINKYEGGLDTFSRGYEKFGFIRSATGVTYREWAPGAKSAALIGDFNNWNSNADVMTRNEFGVWEIFLPNNVDGSPPIPHGSRVKIRMDTPSGVKDSIPAWIKFSVQAPGEIPYSGIYYDPPEEEKYVFKHPQPKRPKSLRIYESHVGMSSPEPMINTYANFRDDVLPRIKKLGYNAVQIMAIQEHSYYASFGYHVTNFFAPSSRFGTPEELKSLIDKAHELGLLVLMDIVHSHASNNTLDGLNMFDGTDSHYFHPGSRGYHWMWDSRLFNYGSWEVLRYLLSNARWWLDEYKFDGFRFDGVTSMMYTHHGLQVAFTGNYSEYFGMATDVDAVVYLMLANDLIHGLFPEAVTIGEDVSGMPTFCLPTQDGGVGFDYRLQMAIADKWIEILKKQDEDWKMGDIVHTLTNRRWLEKCVAYAESHDQALVGDKTIAFWLMDKDMYDFMALDRPSTPRIDRGIALHKMIRLITMGLGGEGYLNFMGNEFGHPEWIDFPRGEQQLPNGSVIPGNNYSYDKCRRRFDLGDADYLRYRGMQEFDRAMQLLEEKFGFMTAEHQYISRKNEGDKVIIFERGNLVFVFNFHWHNSYSDYRVGCSTPGKYKIVLDSDDALFGGFNRLNHSAEYFTNEGWYDDRPRSFLVYAPSRTAAVYALADDDLEPALSDEAEPVLADEAEPEPVDP

SEQ ID NO: 8711 - protein, 492 aa, Solanum tuberosum
MDPSKYRPSSAYDTPFLTTNAGGPVYNNVSSLTVGPRGPVLLEDYYLIEKLATFDREKIPERVVHARGASAKGFFEVTHDISHLTCADFLRAPGAQTPVICRFSTVVHERGSPESIRDIRGFGVKFYNRGGNFDLVGNNVPVFFNRDAKSFPDTIRALKPNPKSHIQEDWRTLDFFSFLPESLHTFAFFYDDVCLPTDYRHMEGFGVHAYQLINKEGKAHYVKFHWKPTCGVKCMSEEEAIRVGGTNHSHATKDLYDSIAAGNYPEWKLFIQTMDPEDVDKFDFDPLDVTKTWPEDLLPLIPVGRLVLNRNIDNFFAENEQLAFNPGHIVPGIYYSEDKLLQTRIFAYADTQRHRIGPNYMQLPVNAPKCGHHNNHRDGAMNMTHRDEEVDYFPSRFDPCRPAEQYPIPACVLNGRRTNCVIPKENNSKQAGERYRSWESDRQDRYINKWVESLSDPRVTHEIRSIWISYLSQADKSCGQKVASRLTVKPTM

SEQ ID NO: 8712 - protein, 492 aa, Triticum aestivum
MDPYKYRPSSSFNAPMWSTNSGAPVWNNDNSLTVGSRGPILLEDYHLVEKIADFDRERIPERVVHARGASAKGFFEVTHDVSHLTCADFLRAPGVQTPVIVRFSTVIHERGSPETLRDPRGFAIKFYTREGNWDLVGNNFPVFFIRDGMKFPDMVHALKPNPKTHIQENWRILDFFSHHPESLHMFTFLFDDIGVPADYRHMDGSGVNTYTLVNRAGKAHYVKFHWKPTCGVKSLLEEEAVTVGGTNHSHATKDLTDSIAAGNYPEWTFYIQTIDPDHEDRFDFDPLDVTKTWPEDVVPLQPVGRLVLNRNIDNFFAENEQLAFCPGIIVPGVYYSDDKLLQTRIFSYSDTQRHRLGPNYLLLPANAPKCSHHNNHYDGLMNFMHRDEEVDYFPSRFDPAKHAPRYPIPSRTLNGRREKMVIEKENNFKQPGERYRSMDPARQERFINRWIDALSDPRLTHEIKAIWLSYWSQADKSLGQKLASRLSSKPSM

SEQ ID NO: 8713 - protein, 492 aa, Cucurbita pepo
MDPYKYRPSSAYNTPFCTTNSGAPIWNNTAVMSVGERGPILLEDYQLIEKIATFTRERIPERVVHARGASAKGFFEVTHDVSDLSCADFLRAPGVQTPVIVRFSTVIHERVSPETVRDPRGFAVKFYTREGNFDLVGNNFPVFFVRDAMQFPDVIRAFKPNPKSHLQESWRFLDFCSYHPESLLSFAWFYDDVGIPINYRHMEGFGVQAYSLINKAGKARLVKFHWKPTCGVKSMLEEEAIRVGGSNHSHATQDLYESIAAGNFPEWRLYIQTIDYEDQNNYDFEPLDTTIAWPEDVVPLRPVGRLVLNKNIDNFFAENEMLAFSMSLVPGIHYSDDKMLQARSFAYADTQRHRLGPNYLQLPVNAPKCPHHNNHHEGFMNFMHRDEEVNYFPSRYDACRHAEKYPMPPNVLSGKRERCVIPKENHNFKQAGDRYRSWAPDRQERFVNRFVEALSDSKVTHEVRNIWISYWTQADRSLGQKIASRMNARPNM

SEQ ID NO: 8714 - protein, 735 aa, Vigna radiata
MFNCLCLNPFISVSSTVACTSHTVRSRQRLAPQKSVDLALGYRNPLGYGFGFGLRRSLHEMVSSRFKGVAVMTDDKSTISSTEEYLENIGIFSIDPSLKPYKDHFKYRLKRYVDQKKLIEEYEGGLEEFAKGYLKFGFNREEGGIVYREWAPAAQEAQIIGDFNGWDGSNHQMEKNQFGVWSIKIPDADGNPAIPHSSRVKFRFRHGDGVWVDRIPAWIKYATVDPNRFAAPYDGVYWDPPLSERYEFKYPRPPKPKAPRIYEAHVGMSSSEPRINSYREFADEILPRIRANNYNTVQLMAVMEHSYYASFGYHVTNFFAVSSRSGTPEDLKYLIDKAHSLGLQVLMDVIHSHASNNITDGLNGFDVGQTSQDSYFHAGDRGYHKLWDSRLFNYANWEVLRFLLSNLRWWLEEFKFDGFRFDGVTSMLYHHHGINIAFTGDYNEYFSEATDVDAVVYLMLANSLIHSILPDATVIAEDVSGMPGIGQQVSDGGIGFDYRLAMAIPDKWIDYLKNKNEYTWSMKEISWSLTNRRYTEKCVSYAESHDQAIVGDKTVAFLLMDEEMYSGMSCLVDPSPIVERGIALQKMIHFITMALGGEGYLNFMGNEFGHPEWIDFPREGNGWSYEKCRRQWNLVDTDHLRYKFMNAFDRAMNLLDDKFSFLASSKQIVSSADDEDKVIVFERGDLIFVFNFHPENTYEGYKVGCDLPGKYRVALDSDAWEFGGHGRVRSPNLWG

SEQ ID NO: 8715 - protein, 91 aa, Oryza longistaminata
RDAKARYVKFHWKPTCGVSCLMDDEATLVGGKNHSHATQDLYDSIAAGNFPEWKLFVQVIDPEEEERFDFDPLDDTKTWPEEEVPLRPVGR

SEQ ID NO: 8716 - protein, 352 aa, Methanopyrus kandleri AV19
MSLIEIDGSYGEGGGQILRTAVGMSALTGEPVRIYNIRANRPRPGLSHQHLHAVKAVAEICDAECEGLEIGSTEIVFEPGKVKGGEYEVDIGTAGSVTLLLQAVKLAAIAADGPVEMEVRGGTDVKWSPPVDYEINVNAHYLDRLGYRYELEVLRRGHYPRGGGIVRARMEPPKRLKPLEAVKFGELESVRGISHCVRLPPHVAERQAKAASEIIERELGIRPEIEIETYPKGRDPHLGPGSGIVLWAEDDQGNRIGADALGEKGKPAEVVGREAAEQLVQRLRTGMALDEHMGDQILPFLAIADGESVFGVTGVDPHLPTNAWVVEKFLPVSVEIRGKEGEPATVEVRPEG

SEQ ID NO: 8717 - protein, 90 aa, Oryza longistaminata
RDAKARYVKFHWKPTCGVSCLMDDEATLVGGKNHSHATQDLYDSIAAGNFPEWKLFVQVIDPEEEERFDFDPLDDTKTWPEEEVPLRPVG

SEQ ID NO: 8718 - protein, 115 aa, Zea mays
  misc_feature (55)..(55): Xaa can be any naturally occurring amino acid
  misc_feature (100)..(100): Xaa can be any naturally occurring amino acid
HASSNTLDGLNGFDGTDTHYFHSGPRGHHWMWDSRLFNYGNWEVLRFLLSNARWXLEEYKFDGFRFDGVTSMMYTHHGLQVTFTGNFNEYFGFATDVDAXVYLMLVNDLIHGLYP

SEQ ID NO: 8719 - protein, 485 aa, Candida albicans SC5314
MAPTFTNSNGQPIPEPFATQRVGQHGPLLLQDFNLIDSLAHFDRERIPERVVHAKGSGAYGVFEVTDDITDICAAKFLDTVGKKTRIFTRFSTVGGELGSADTARDPRGFATKFYTEEGNLDLVYNNTPVFFIRDPSKFPHFIHTQKRNPETHLKDANMFWDYLTSNEESIHQVMVLFSDRGTPASYREMNGYSGHTYKWSNKKGEWFYVQVHFISDQGIKTLTNEEAGALAGSNPDYAQEDLFKNIAAGNYPSWTAYIQTMTEAEAKEAEFSVFDLTKVWPHKKYPLRRFGKFTLNENPKNYFAEVEQAAFSPAHTVPYMEPSADPVLQSRLFSYADTHRHRLGTNYTQIPVNCPVTGAVFNPHMRDGAMTVNGNLGSHPNYLASDKPVEFKQFSLQEDQEVWNGAATPFHWKATPADFKQAQELWKVLKRYPNQQEHLAHNIAVHAAGADAAIQDRVFAYFGKVSQDLADAIKKEVLELSPRK

SEQ ID NO: 8720 - protein, 392 aa, Candida albicans SC5314
MTISNSNLFKPIKVGNKTIKNRIAHLPTTRNRATDDHVPTDLMKKYYTDRAKSGSLLITEATLISLDQGVYPNVPGMWNKQQKDAWKEITDSVHSIGGTIAIQLWALGRVGNAKLLKDEGLPLTGVSPIYEHEKAEQDAIDAGNPIQELTQDQIKDIVYNQFANAVKLADEAGFDFIELHGANSYLFEQFIHPGTNKRTDKYGGSIENRARFLFEVVDHVSTIVDPAKLAIRLSPLNNFQVPFVNPEGQEDYSYIVEGLQKRADEGKGLAFIDVVEGRFTSDGGTEGCNVDFVGEIWKGPLLKGGNYTYDRKNEWKTIENDANADDRTLVGFGRYFIANPDLPARIQKGNELNDYDRSTFYNTDDYGYNTYPFYGEENKADPNIKVLGVALA

SEQ ID NO: 8721 - protein, 115 aa, Zea mays
  misc_feature (100)..(100): Xaa can be any naturally occurring amino acid
HASSNTLDGLNGFDGTDTHYFHSGPRGHHWMWDSRLFNYGNWEVLRFLLSNARWWLEEYKFDGFRFDGVTSMMYTHHGLQVTFTGNFNEYFGFATDVDAXVYLMLVNDLIHGLYP

SEQ ID NO: 8722 - protein, 910 aa, Desulfotalea psychrophila LSv54
MSLRNFFLALFFAVLFFFSSAIAFAGWQEAPVVLILNSYHQGFGWGDAEVEAEIDVLRENFPEMSLYIEHMDQKRFPGEEGERHTLQQLEFKFAKFSPDIIIANDNIAFAFALRLRDLLWSDIPIVFSGYNGDDRLLDSLGSGVTGVFEEIDAVGTINMALKLQPGIKHVFVVVEDTITGRAVLTNVQPKLRQFGDRLRFEYLAEKGLPEILARLRLASDESIVLLLPYATSQPGTHMDARSLADLIIETSPVPVYTPYDFHLGLGALGGYVLEGKEQGQLAAELAVKILTTGNIPAPVKEELHFSPVFDNEVLNRFSIEVSELPPGSEVINQLSLGFYEQNTTFINLIALIAILLVSLLLTLLINIHLQRNAERKFVEIFDATSEAVLVCDIDTLQVLEFNRSSELLLGAEEQLVKLTDLRWNFCGEEPYDDQAFQQLIERTVRDGSLTVDWQMKRYSGEKFWAGMTLNYMQIKDVDCLLVVIRDVEQRHQLAGELEAYKFHLEELVDQKTADLQRFQQDLITAKDEAERANQAKSTFVANMSHEIRTPLNGVLGLAQLLEKTSLSVDQRSYVRRILDSGQQLLTTVNDILDFAKMEAGRLEIEESGFSLHALLQPVIDSVFVEEESSPKFCLDVAPGIPENLIGDRFRIGQVLINLLGNALKFTKEGHVSLHVVSMGLGEKGVILKFSIIDTGVGIALDVQKQLFVPFTQADSSVTRNYGGTGLGLTICKKLVVAMGGDIGLESSPGAGSTFWFTLDLGVGQEGDAQNTEAVQVNSVDRKSLLEGLKILLVDDNEINLYMMEAILLAAGAEVTLAENGQECLERLEESSYDLILMDVQMPVLDGYETTRRIRKDEKYRALPIIAITANALSDDIEKCFEAGMNDHVAKPFKIEELDASIAKCLLASRS

SEQ ID NO: 8723 - protein, 374 aa, Acanthothamnus aphyllus
ALSIAGAVQSQKLAVRAISHLQSLPGGDIKLLCATVVDSVRDLTGYDRVMVYKFHEDEHGEVVAESKRPDLEPYIGLHYPATDIPQASRFLFKQNRVRMIVDCRASPVGVRQDDGLMQPLCLVGSTLRAPHGCHAQYMENMGSKASLAMAVIINGNDEESIGGRNATRLWGLVVCHHTSARCIPFPLRYACEFLMQAFGLQLNMELQLAAQLSEKHVLKTQTLLCDMLLRDSPTSIVTQSPSIMDLVKCDGAALYYQGKYCPLGVTPAEAQIKDIVEWLLAFHGDSTGLSTDSLGDAGYPGAALLGNAVCGMAVAYITNRDFLLWFRSHTTKEIKRGGAKHHPEDKDDGQRMHPRSSFKAFLEVVKSRSLPWEN

SEQ ID NO: 8724 - protein, 631 aa, Bordetella bronchiseptica RB50
MIHLDGAAVDPAVLQGMTDAIAHRGPDGEGHWIDGNVGLGHRRLAIIDLSPAGHQPMISADSRYVLSYNGEIYNFRELRAELQGEGCQFRSQTDSEVLLHALIVWGVERTLSRLNGMFAFAWWDTRERKLLLARDRYGVKPLYFSMQGTTLAFGSEQKAILASAAFRRNLNKAALLEYFTFQNIFTDQTLLEDVHLLPAGHYAYLDCAKERPQLRLTQYWDFNFHEPAVPGTDTEYREELSRLFRQAVQRQLVSDVELGSYLSGGMDSGSITAVAAASHPYIKTFTCGFDLNSASGIELAFDERSKAEYMSYFFKTEHYEMVLKSGDMERVLPALAWHLEEPRVGQSYPNYYAAKLASKFVRVVLSGAGGDELFGGYPWRYYRAVVNNDFEHYVDKYYLFWQRLIPNSTLKQVFRPVWSDVSHVWTRNIFRDVFNSHADQLYSPEDYINHSLYFEAKTFMHGLLVVEDKLSMAHGLESRVPFLDNDLVDFATRCPVRLKLNNLADVIKLNENEPGHKTNKYFEKTRDGKQILRDVMRDYIPSDIAQAEKQGFSAPDASWFKGESMDFVKRTLFSKHARIYEIMDADTVRSLVAEHLSGERNRRLLIWSLLNVESWLAQYLDHGGVAGKGLA

SEQ ID NO: 8725 - protein, 115 aa, Zea mays
HASSNTLDGLNGFDGTDTHYFHSGPRGHHWMWDSRLFNYGNWEVLRFLLSNARWWLEEYKFDGFRFDGVTSMMYTHHGLQVTFTGNFNEYFGFATDVDAVVYLMLVNDLIHGLYP

SEQ ID NO: 8726 - protein, 364 aa, Brexia madagascariensis
VQSQKLAVRAISRLQSLPGGDIKLLCDTVVESVRDLTGYDRVMVYKFHEDEHGEVVAESQRPDLEPYIGLHYPATDIPQASRFLFKQNRVRIIVDCHASSVRVIQDDGLMQPLCLVGSTLRAPHGCHAQYMENMGSIASLAMAVIINGNDEEVIGGRNPTRLWGLVVCHHTSARCILFPLRYACEFLMQAFGLQLNMELQLAAQLLEKHVLKTQTLLCDMLLRESPTGIVTQSPSIMDLVKCDGAALYYQGNFYPLGVTPTEAQIKDIVEWLLAFHGDSTGLSTDSFADAGYPGAALLGDAVCGMAVAYITNRDFLFWFRSHTAKEIKWGGAKHHPEDKDDGQRMHPRSSFKAFLEVVKRRSLP

SEQ ID NO: 8727 - protein, 303 aa, Gibberella zeae PH-1
MADQHEVDLDSIIDRLLEVRGSRPGKQVQLLEAEIRYLCTKAREIFISQPILLELEAPIKICGDIHGQYYDLLRLFEYGGFPPEANYLFLGDYVDRGKQSLETICLLLAYKIKYPENFFILRGNHECASINRIYGFYDECKRRYNIKLWKTFTDCFNCLPIAAIIDEKIFTMHGGLSPDLNSMEQIRRVMRPTDIPDCGLLCDLLWSDPDKDITGWSENDRGVSFTFGPDVVSRFLQKHDMDLICRAHQVVEDGYEFFSKRQLVTLFSAPNYCGEFDNAGAMMSVDESLLMAAKTRQSIPSPR

SEQ ID NO: 8728 - protein, 462 aa, Listeria monocytogenes EGD-e
MFKTNVEQNNVPVFGSFESGQDLPEKRMNKESVDPRIAYQLVKDQLIDEGSARQNLATFCQTYMEPEAEQIMAETMEKNAIDKSEYPQTAKLESSCVNMLADLWNVDESEHYMGTSTVGSSEACMLGGMAMKFRWRSAALKNGLDIHAKKPSLVISSGYQVCWEKFCVYWDIELREVPMSEEHLSINTDIIMDYVDEYTIGIVGILGITYTGKFDDIMTLNDLVEDYNNTHDNEVVIHVDGASGAMFTPFVEPGLEWDFRLPNVVSINTSGHKYGLVYPGVGWILWRDKEYLPEELVFDVSYLGGHMPTMAINFSRSASQIIGQYYNFLRFGYEGYRQIHMRTRDGALQLSQAVAETGLFEIYNDGANLPIVCYKLKDDANVAWTLYDLADRLQMKGWQVPAYPLPKEMGNTIIQRYVCRGDLGQNMVTAFKNDLSESIEELNNAHILYHDVNTSKTHGFTH

SEQ ID NO: 8729 - protein, 249 aa, Fragaria x ananassa
MAYENKPNTDLDADAQRRLGRGKIEIKRIENTTNRQVTFCKRRNGLLKKAYELSVLCDAEVALIVFSNRGRLYEYSNNSSVRETIERYKKACADTSTNGSASEATTQYYQQEAAKLHNQINALQNINRGYMAEGLSNKNIKELKGMERKLERAITRIRSKKNELLFAEIEYMQKRELDLHNNNQLLRAKIAENERQQQSIIAITGGHGSYEIVQPTQPFHEARNYFQVNALQPNIHQYSCHDQVSLQLV

SEQ ID NO: 8730 - protein, 361 aa, Brexia madagascariensis
QSQKLAVRAISRLQSLPGGDIKLLCDTVVESVRDLTGYDRVMVYKFHEDEHGEVVAESQRPDLEPYIGLHYPATDIPQASRFLFKQNRVRIIVDCHASSVRVIQDDGLMQPLCLVGSTLRAPHGCHAQYMENMGSIASLAMAVIINGNDEEVIGGRNPTRLWGLVVCHHTSARCILFPLRYACEFLMQAFGLQLNMELQLAAQLLEKHVLKTQTLLCDMLLRESPTGIVTQSPSIMDLVKCDGAALYYQGNFYPLGVTPTEAQIKDIVEWLLAFHGDSTGLSTDSFADAGYPGAALLGDAVCGMAVAYITNRDFLFWFRSHTAKEIKWGGAKHHPEDKDDGQRMHPRSSFKAFLEVVKRRS

SEQ ID NO: 8731 - protein, 496 aa, Triticum aestivum
  misc_feature (266)..(266): Xaa can be any naturally occurring amino acid
HEVDKDFLFGASTSAYQIEGAWNEDGKGPSTWDHFCHTYPERISDRTNGDVAANSYHLYEEDVKALKDMGMKVYRFSISWSRILPNGTGKPNQKGIDYYNNLINSLIHHGIVPYVTIWHWDTPQALEDKYGGFLNRQIVNDYKHFAKVCFESFGDRVKNWFTFNEPHTYCCFSYGEGIHAPGRCSPGMDCAVPEGDSLREPYTAGHHILLAHAEAVELFKAHYNEHGDSKIGMAFDVMGYEPYQDSFLDDQARERSIDYNLGWFLXEPVVRGDYPFSMRSLIGDRLPMFTKEEQEKLASSCDIMGLNYYTSRFSKHVDISSDFTPKLNTDDAYASSETKGSDGNDIGPITGTYWIYMYPKGLTDLLLIMKEKYGNPPIFITENGIADVDSDPTMTDPLDDWKRLDYLQRHISAVKDAIDQGADVRGHFTWGLIDNFEWSLGYSSRFGLVYIDKKDGNKRKLKKSAKWFAKFNSVPKALLKTTNTNNKPAVTASVSL

SEQ ID NO: 8732 - protein, 112 aa, Beta vulgaris subsp. vulgaris
HVIKIKDIILPPEREKFNDVYIVYELMDTDLHQIIRSNQELTEDHCQYFLYQLLRGLKYIHSANVLHRDLKPSNLLLNANCDLKICDFGLARTTAETDFMTEYVVTSWYAPG

SEQ ID NO: 8733 - protein, 363 aa, Campylostemon angolense
QSQKLAVRAISQLQSLPGGDIKLLCDTAVESVRNLTGYDRVMVYKFHEDEHGEVVAESRRPDLEPYIGLHYPATDIPQASRFLFKQNRVRIIVDCHASPVSVIQDDGLMQPLCLVGSTLRAPHGCHAQYMENMGSIASLAMAVIINGNDEDGIGGRNPTRLWGLVVCHHTSVRCIPFPLRYACEFLMQAFGLQLNMELQLAAQLLEKHVLKTQTLLCDMLLRESPTGIVTQSPSIMDLVKCDGAALYYQGNYYPSGVTPTEAQIKDIVNWLLAFHGDSTGLSTDSLADAGYPGATLLGDAVCGMAVAYITNRDFLFWFRSHTAKEIKWGGAKHHPEDKDDGQRMHPRSSFKAFLEVVKSRSLP

SEQ ID NO: 8734 - protein, 657 aa, Oryza sativa
  misc_feature (313)..(313): Xaa can be any naturally occurring amino acid
  misc_feature (566)..(566): Xaa can be any naturally occurring amino acid
MSSRQPSESREGRRASGAGGASSSRSSSRVASRSGSVHRSKEKKPVCIGQYIIQQTLGAGSFGKVKLATHALTGHRVAMKIINRRKISSLDMGGRVKREIQYLKLLRHPHIIKLYEVITTPNDIIMVIEYAGGELFQYIVDRGRMPEPEARRFFQQVICAMEYCHRHKIVHRDLKPENLLLDEYLNVKIGDFGLSNIMTDGDFLKTSCGSPNYAAPEVISGRLYAGPEIDIWSCGVILYVMLCGRLPFDDEYIPTLFKKINNGIYTLPSYLSQEARHLLSQMLIVDPVKRITIHEIRQHPWFNVDLPAYLRPXAAHTGGGEPRLQLWPYRPAVLDDLGPIDAEIVDELVGKMVGFNRDELLHHLADKSDNQVKVAYQLVRDHRRMLQIHHMEDAHGMENFLAQSPPAWNEGLEGFMGRSTSIKRKNRDKEVAGGAAVRSTTREPLTDAEDAAGERMERIAVLETSLPGYLRAREAERLATPSADKTAWPQCTPLSPTSGSGTPALPAAAAAAAASAAAQIHKKPRSRWHFGIRSRSPPMEIMLELYRTLQSLGMEWRQKPVARAAXRRRTRARARARAMQPTKTNTRRAKARRQQARAWSCFSSRRAGRWGMWWCAWICSCTTWMRSTTSSTFATSATRCSSPRWEQGQARRMRVRR

SEQ ID NO: 8735 - protein, 361 aa, Campylostemon angolense
QKLAVRAISQLQSLPGGDIKLLCDAAVESVRNLTGYDRVMVYKFHEDEHGEVVAESRRPDLEPYIGLHYPATDIPQASRFLFKQNRVRIIVDCHASPVSVIQDDGLMQPLCLVGSTLRAPHGCHAQYMENMGSIASLAMAVIINGNDEDGIGGRNPTRLWGLVVCHHTSVRCIPFPLRYACEFLMQAFGLQLNMELQLAAQLLEKHVLKTQTLLCDMLLRESPTGIVTQSPSIMDLVKCDGAALYYQGNYYPSGVTPTEAQIKDIVNWLLAFHGDSTGLSTDSLADAGYPGATLLGDAVCGMAVAYITNRDFLFWFRSHTAKEIKWGGAKHHPEDKDDGQRMHPRSSFKAFLEVVKSRSLP

SEQ ID NO: 8736 - protein, 179 aa, Zea mays
MAEAPASPGGGGGSHESGSPRGGGGGGSVREQDRFLPIANISRIMKKAIPANGKIAKDAKETVQECVSEFISFITSEASDKCQREKRKTINGDDLLWAMATLGFEDYIEPLKVYLQKYREMEGDSKLTAKSSDGSIKKDALGHVGASSSAAEGMGQQGAYNQGMGYMQPQYHNGDISNV

SEQ ID NO: 8737 - protein, 492 aa, Cucurbita pepo
MDPYKYRPSSAYNTPFCTTNSGAPIWNNTAVMSVGERGPILLEDYQLIEKIATFTRERIPERVVHRRGASAKGFFEVTHDISNLTCADFLRAPGVQTPVIVRFSTVIHERGSPETLRDPRGFAVKFYTREGNFDLVGNNFPVFFVRDAMQFPDVIRAFKPNPKSHLQEPWRYLDFCSYHPESLLSFAWFYDDVGIPINYRHMEGFGVQAYSLINKSGKARLVKFHWKPTCGVKSMMEEEAIRIGGTNHSHATQDLYESIAAGNFPEWRLYIQTIDYEDQNKYDFEPLDTTITWPEDVVPLQPVGRLVLNKNIDNFFAENEMLAFSMSLVPGIHYSDDKMLQARSFAYADTQRHRLGPNYLQLPVNAPKCPHHNNHHEGFMNFMHRDEEVNYFPSRYDPCRHAEKFPMPPNVLTGKRERCVIPKENNNFKQAGDRYRSWAPDRQDRFVKRFVEALSDPRVTDEVRNIWISYWSQADRSLGQKIASRLNVRPNI

SEQ ID NO: 8738 - protein, 905 aa, Azotobacter vinelandii
MLTLLPSCLLALVLGIYFTWQQLAEMHGNLVGRGQLIVSQLAPLAAPALAQNYHNRLQRIANRVLDQTDIRAVSFLDSELGTIVHAGPSLNGPLPPQDPTQLTMVRDNSATHLLMPVLGYHQNLASGSNDRDDHLLGWIALEISHHNALLQGYRNLLASLLLILSVLLVSAFLALRVGRSISDPLRRIQQGVSQLRDGHLETRLPSLRSHELDELAAGINRMAEVMQHAQEEMQNSIDQATEDVRQNLETIEIQNIELDMVRREALEASRIKSEFLANMSHEIRTPLNGIIGFTNLLQKCELTPRQHDYLNTIQKSADSLLDIINEILDFSKIEAGKLVLEHTPFNLRELIQDTLTILAPAAHAKHLELVSLIYRDTPLALNGDPQRLRQVLTNLISNAIKFTNEGTIAVRAMVEDIGEEFAQLRISVHDTGIGLSQEDLNALFQAFSQADNSLTRQAGGTGLGLVISKRLIEQMGGEIGVNSVPGEGSEFWIRLSLPLDDHSEDEPPTALHGHRVALLEQHELARQSIQHQLEDCGLEVQPFAELDSLLAGVAAARQEERPVGLAVLGVTSRDTSAEELAQRIADLERLGCKCLVLCPTTEQMFYQEVLPEAQIQLQSKPAHRDKLQAALGELLTPQPTGSQTLGPLGNRAPRLLCVDDNPANLLLVQTLLGDMGAAVTVADSGHAAVEAAQRERFDLIFMDVQMPGMDGRQATRAIRQWEAGQPEQRHTPIIALTAHALANERRALLQSGMDDYMTKPINERQLAQVVHKWTRLHLRSPGAQQVHEVQPASIGHLSVLDSEEGLRLAAGKPDLAADMLSMLLASLDADRQAIHQARRDGDRAALIERVHRLHGATRYCGVPQLRAACQHSETLLKQHAPAADTALDELDAAILRLAGEAKFGA

SEQ ID NO: 8739 - protein, 524 aa, Enterococcus flavescens
MAKEIKFAEDARAAMLRGVDKLADTVKVTLGPKGRNVVLEKSYGSPLITNDGVTIAKEIELEDHFENMGAKLVSEVASKTNDIAGDGTTTATLLTQAIVREGLKNVTAGANPLGIRRGIEMATKVAVEELHNISSIVDSKEAIAQVCAVSSGSEKVGQYIADAMEKVGNDGVITIEESKGIETELDVVEGMQFDRGYLSQYMVTDNDKMEAALENPYILITDKKISNIQDILPLLEQILQQSKPLLIIADDVDGEALPTLVLNKIRGTFNVVAVKAPGFGDRRKAMLEDIAILTGGTVITEDLGLELKDATIDNLGQASKVVVDKDNTTIVEGAGEKEAIDARVQLIKNQIADTTSDFDREKLQERLAKLAGGVAVIKVGAPTETELKELKLRIEDALNATRAAVEEGMVSGGGTALVNVINKVAEIETDGDAATGVKIVLRALEEPVRQIAENAGYEGSVIIDKLKNADLGVGFNAATGEWVNMLEAGIVDPTKVTRSALQNAASVAALLLTTEAVVADKPEP

SEQ ID NO: 8740 - protein, 590 aa, Asparagus officinalis
MCGILAVLGCSDDSQAKRVRVLELSRRLKHRGPDWSGLCQHGDCFLSHQRLAIIDPASGDQPLYNEDKSIVVTVNGEIYNHEELRRRLPDHKYRTGSDCEVIAHLYEEHGEDFVDMLDGMFSFVLLDTRNNCFVAARDAVGITPLYIGWGLDGSVWLSSEMKGLNDDCEHFEVFPPGNLYSSRSGSFRRWYNPQWYNETIPSAPYDPLVLRKAFEDAVIKRLMTDVPFGVLLSGGLDSSLVAAVTARHLAGSKAAEQWGTQLHSFCVGLEGSPDLKAAKEVAEYLGTVHHEFHFTVQDGIDAIEDVIFHIETYDVTTIRASTPMFLMARKIKSLGVKMVISGEGSDEIFGGYLYFHKAPNKEEFHHETCRKIKALHQYDCLRANKATSAWGLEARVPFLDKEFMDVAMSIDPESKMIKPDLGRIEKWVLRKAFDDEENPYLPKHILYRQKEQFSDGVGYSWIDGLKAHAAKHVTDRMMLNAARIYPHNTPTTKEAYYYRMIFERFFPQNSARLTVPGGPSIACSTAKAIEWDARWSNNLDPSGRAALGVHDSAYDPPLPSSISAGKGAAMITNKKPRIVDVATPGVVIST

SEQ ID NO: 8741 - protein, 321 aa, Candida sp. GCY 2005
MTTSSTIKLNSGYEMPIVGFGCWKVTNETAADQIYNAIKIGYRLFDGAQDYGNEKEVGEGINRAIKDGLVKREELLITSKLWNNFHDPKNVELALDKTLSDLNLGYLDLFLIHFPIAFKFVPIEEKYPPGFYCGDGNNFHYENVPLLDTWKALEKLVQKGKIRSIGISNFTGALIYDLIRGATIKPSVLQIEHHPYLQQPKLIEYVQKQNIAITAYSSFGPQSFLELESKRALDTPTLFEHKTIKSIAEKHGKTPAQVLLRWATQRNIAVIPKSNNPARLAQNLSVVDFDLSKEDIQEISALDIGVRFNDPWDWDNIPIFV

SEQ ID NO: 8742 - protein, 62 aa, Glycine max
  misc_feature (5)..(5): Xaa can be any naturally occurring amino acid
  misc_feature (18)..(18): Xaa can be any naturally occurring amino acid
  misc_feature (35)..(36): Xaa can be any naturally occurring amino acid
  misc_feature (54)..(54): Xaa can be any naturally occurring amino acid
DAQNXVDHLSGFNVANRXLIVLYYQPAKMSKKSDXXKKEDEITRLQEKYGIGSXTPGPGSSD

SEQ ID NO: 8743 - protein, 358 aa, Canotia holacantha
ESQKLAVRAISHLQSLPGGDIKLLCATVVESVRDLTGYDRVMVYKFHEDEHGEVVAESKRPDLEPYIGLHYPATDIPQASRFLFKQNRVRMIVDCCASPVGVIQDDGLMQPLCLVGSTLRAPHGCHAQYMENMGSKASLAMAVIINGKDEEIVGGRNATRLWGLVVCHHTSARCIPFPLRYACEFLMQAFGLQLNMELQLAAQLSERHVLKTQTLLCDMLLRDSPTGIVTQSPSIMDLVKCDGAALYYQGKYYPSGVTPSEAQIKDIVEWLLAFHGDSTGLSTDSLADAGYPGAAFLGDAVCGMAVAYITNRDFLFWFRSHTTKEIKWGGAKHHPEDKDDGQRMHPRSSFKAFLEVVK

SEQ ID NO: 8744 - protein, 372 aa, Zea mays
  misc_feature (188)..(188): Xaa can be any naturally occurring amino acid
  misc_feature (338)..(338): Xaa can be any naturally occurring amino acid
ARNSARATMKLIKHPNVVRIYEVMGSKTKIYIVLEFATGGELFDTIVNHGRMREDEARRYFQQLINAVDYCHSRGVYHRDLKPENLLLDSYGNLKVSDFGLSALSQQIKDDGLLHTTCGTPNYVAPEVLEDQGYDGAMADLWSCGVILFVLLAGYLPFEDSNLMTLYKKISNAEFTFPPWTSFPAKRXITIPEILEDEWFKKGYKRPEFDEQYDTTLDDVDAVFNDSEEHHVTEKKEEEPVALNAFELISMSAGLNLGNLFDSEQEFKRETRFTSKCPPKEIVRKIEEAAKPLGFDVQKKNYKLRLEKVKAGRKGNLNVATEILQVAPSLHMVEVRKXKGDTLEFHKFYKNLSKTLKDVVWKSDDLQTQHAS

SEQ ID NO: 8745 - protein, 466 aa, Leifsonia xyli subsp. xyli str. CTCB07
MRKTNADDRPAVVWFRDDLRLADNPALHAAAESGRPVICLYVWDEDSPGLRSPGEAARWWLHHSLTSLEESIGRAGSALAIRTGPAERVLAEVLAEVDAGAVFWNRRYGEGERRVDERVKSAARDTGLVANSFGANLLFEPWTVRTGSGTAFSVYTPFWRACLARPEPRRPLPALRRLRPGPSLPSLELDELKLLPVHPDWADGLRETWKPGERAAHRELSAFLGEGLARYRAERDVPGIAATSRLSPRLRWGELSPFQVWHATAAARDRSTAEGAATFLSELGWREFAYHTYFERPALATVNIHREYDSFPWPRLHPSALRAWQQGRTGVPLVDAGMRELWRTGVMHNRVRMVAASFLTKNLLIDWRRGEQWFWDTLVDADPASNPFNWQWVAGSGADTAPYFRVFNPEVQREKFDPHGDYVRRWVPEWDTADYPEPLVDLAETRRAALAAWETVKAARGTAERS

SEQ ID NO: 8746 - protein, 374 aa, Canotia holacantha
ALSIAGAVESQKLAVRAISHLQSLPGGDIKLLCATVVESVRDLTGYDRVMVYKFHEDEHGEVVAESKRPGLEPYIGLHYPATDIPQASRFLFKQNRVRMIVDCCASPVGVIQDDGLMQPLCLVGSTLRAPHGCHAQYMENMGSKASLAMAVIINGKDEEIVGGRNATRLWGLVICHHTSARCIPFPLRYACEFLMQAFGLQLNMELQLAAQLSEKHVLKTQTLLCDMLLRDSPTGIVTQSPSIMDLVECDGAALYYQGKYYPSGVTPSEAQTKDIVEWLLAFHGDSTGLSTDSLADAGYPGAAFLGDAVCGMAVAYITNRDFLFWFRSHTTKEIKWGGAKHHPEDKDDGQRMHPRSSFKAFLEVVKSRSLSWEN

SEQ ID NO: 8747 - protein, 653 aa, Caulobacter crescentus CB15
MNAATLVDTHAVDTALQEAFEAAPEGFALFDAEDRCVIWNARYGELWSKWGVTLAVGATFESLLLAGLAAGRFPEANGDRAAWLAHQLGRRKLDRIEEIREEFGEYLRFESRRTPAGGLITTCANLTNLRRREAQALAARSFLDTIVENTPAMLFVKDGDTGAFLLVNRAAENQLGVPRAELLGKSDYDFFPKEQADAFAADDRRVIASGKLVTIDEEPLDTPHNGRRWLQTRKIAIPGEDGRRHLLVICEDITERKAGAAALAEALQKAEAGSVAKSEFLANMSHEIRTPLNGVIGMAEVLSRTALDDAQREMMEVILNSGRALNLLLSDILDLSKIEAGGLELSRDPLDLREAITAAVAVFKAVAESKGLVFRLTFADDFHDHVLGDALRVRQIVANLTSNAVKFTTAGSVIIEARTLVAEDGRIDLTVSVQDTGEGFDEDSADRLFERFQQADGSVTRKVGGTGLGLPIARRLARLMDGEISCVAHPGEGATFVFEALFLADGQRTPAASADPAGELALDRRLRVLLAEDHPTNQKVIGLMLADAADVTVAEDGQAAVEAFEKHAYDVVLMDTQMPVMDGLAAIAEIRRREREAQARRTPIISLTANAMPHQVRACLEAGADLHLAKPVSIQGLFATLGAALETRPGGEG

SEQ ID NO: 8748 - protein, 374 aa, Catha edulis
ASSIAGAVQSQKLAVRAISQLQSLPGGDIKLLCDTVVESVRDLTGYDRVMVYKFHEDEHGEVVAESKRPDLEPYIGLHYPASDIPQASRFLFKQNRVRMIVDCRASPVRVIQDDGLMRPLCLVGSTLRAPHGCHAQYMENMGSLASLAMAVIINGNDEEVTGGRNPTRLWGLVVCHHTSARCIPFPLRYACEFLMQAFGLQLNMELQLAAQSLEKHVLKTQTLLCDRFLRDPPTGIVTQSPSIMDLVKCDGAALYYQGNYYPLGVTPTEVQIKDIVEWLLAFHGDSTGLSTDSLADAGYPGAALLGDAVCGMAVAYITNKDFLFWFRSHTAKEIKWGGAKHHPEDKDDGQRMHPRSSFKAFLEVVKSRSLPWEN

SEQ ID NO: 8749 - protein, 546 aa, Piscirickettsia salmonis
MSAKEVRFGTGSRQKMLDGVNLLANAVKVTLGLRGRNVILEKSFGAPTITKDGVSVAKEIELSDKFENMGAQMVKEVASKSNDDAGDGTTTATVLAQAIIQEGVKSVAAGMNPMDLKRGIDKATIAAVAALKDLSTPCTDNKAIAQVGTISANSDEEIGSIIAKAMEKVSTDGVITVEEGSSLENELDVVEGMQFDRGYLSPYFVNKQEKMIAEIESPFILLVDKKISNIRELLPTLESVAKSGKPLFIIAEDVEGEALATLVVNNIRGIVKVCAVKAPGFGDRRKAMLEDIAILTGGTVISEEVGLDLEKATLEHLGTAKRIVVTKDNTTVIDGAGEQTAIEARVTQIRAQVEETSSDYDREKLQERVAKLSGGVAVIKVGAATEIEMKEKKDRVDDALHATRAAVEEGVVPGGGVALVRAMAAVKALDFANDEQAQGANILLRAMSAPLRQIVENAGSEAAVILDKIVNGEGNFGYNAATNEFGDMIEMGILDPTKVTRSALQNAASIAGLMITTEAMVAELPKEDSAGGAGMPDMGGMGGMGG

SEQ ID NO: 8750 - protein, 374 aa, Celastrus orbiculatus
ALSIAGAVQSQKLAVRAISRLQSLPGGDIKLLCDTVVESVRDLTSYDRVMVYKFHEDEHGEVVAESKRPDLEPYFGLHYPSTDIPQASRFLFKQNRVRMIADCRASPVGVIQDDGLMQPLCLVGSTLRAPHGCHAQYMENMGSRSSLAMAVIIHGNDEEVIGGRNATRLWGLVVCHHTSVRCIPFLLRYACEFLMQAFGLQLNMELQLAAQLSEKHVLKTQTLLCDMFLRDSPTGIVTQSLSIMDLVKCDGAALYYQGKYYPIGVTPAEAQIKDIVEWLLTFHGDSTGLSTDSLADAGYPGAALLGDAVCGMAVAYITKRDFLFWFRSHTTKEIKWGGAKHHPEDKDDGQRMHPRSSFKAFLEVVKSRSLPWEN

SEQ ID NO: 8751 - protein, 232 aa, Cytophaga hutchinsonii
MQTFFLHRYAAHQMFTMSKGWEKFFYILTWLFQGSSYLSPYAYGVMHRLHHTYADTDKDPHSPKYSTGMFDMMWKTKNIYNDILHGRIELDPKYKKNVPYWGFIEKMGDNWFSRVAWGTAYTLFYVYFATHWWMFLLLPIHYLMGPVHGAIINWFAHKYGYVNFVVNDTAKNLLPVDFLMFGESYHNNHHKLGGRANFGVKWHEFDPAYPIILFFNAFHIIKLKRNNDLNYM

SEQ ID NO: 8752 - protein, 373 aa, Celastrus scandens
ALSIAGAVQSQKLAVRAISRLQSLPGGDIKLLCDTVVESVRDLTSYDRVMVYKFHEDEHGEVVAESKRPDLEPYFGLHYPSTDIPQASRFLFKQNRVRMIADCRASPVGVIQDDGLMQPLCLVGSTLRAPHGCHAQYMENMGSKSSLAMAVIINGTDEEVIGGRNATRLWGLVVCHHTSARCIPFPLRYACEFLMQAFGLQLNMELQLAAQLSEKHVLKTQTLLCDMLLRDSPTGIVTQSPSIMDLVKCDGAALYYQGKYYPIGVTPVEAQIKDIVEWLLTFHGDSTGLSTDSLADAGYPGAALLGDAVCGMAVAYITKKDFLFWFRSHTTKEIKWGGAKHHPEDKDDGQRMHPRSSFKAFLEVVKSRSLPCE

SEQ ID NO: 8753 - protein, 156 aa, Anabaena variabilis ATCC 29413
MALVRWEPFREVESLQRQLNRLFDEIAPTGRREEEGIAFIPSAEIQETPDAVHLKVEIPGVDPKDLDVQVSPEAVSISGERKSEIKTEERGITRTEFRYGRFQRVIPLPTRVQHDQVQAEYKDGILKLRLPKAEEDRNKVVKVNLGDGHRGNGQGQ

SEQ ID NO: 8754 - protein, 503 aa, Debaryomyces hansenii CBS767
MPQDTETMYSGRVVNKVYNQDFIIDRRFKIVKELGHGAYGIVCSAKYDDGSDNEDGSYVAIKKITNIFSKKILCKRSLRELKLLQFFRGHKNITCLYDLDIIPNPITGEFNEIYLYEELMECDMHQIIRSGQHLTDSHYQSFIYQTLCGLKYIHSADVLHRDLKPGNLLVNADCELKICDFGLARGFLECPEQNVGFMTEYVATRWYRAPEIMLSFTNYTKAIDIWSVGCILAELLGGKPIFRGKDYVDQLNQILLILGTPKESTLTKIGSVRAQNYVRSLPFMRKVHYSELFPTANPLALDLLEKMLTLDPYERITVEEALNHPYLSVWHDPQDEPECQIKFDFKSFETVDDMKSMKNLIIDEVKNFRDFVRKPLQEQQQIQLQMQIQQQEREKQKNDSMDLSTPINQQQFNEMLSSSSNSNSNSNSNPETGVNTDTPKMTNDNDLQYYQSIPKPQELDEFTFSHNSKGLSPTDNNDNHTDLFRLEEELGFGLDGAGMFNNI

SEQ ID NO: 8755 - protein, 357 aa, Anabaena variabilis ATCC 29413
MDLFTPLIIRDITLPSRVAMSPMCQYSAENGFANDWHFVHLGSRAVGGTGLIMVEATAVTPQGRITPGDLGLWDDKQIEPLTRIVRFLRQQGSVTGIQLAHAGRKASCNVPWLGGTPLTPEQGGWQPVAPSPIPFQENAPVPISLDERGIQETIFAFVAAAQRALQVGFQMIEIHAAHGYLLHSFLSPLSNRRTDRYGGSLENRMRLLLEVVRRVRDVLPNGMPLFVRISATDWVEGGWDLQQSIILSRELKTLGVDLIDVSTGGLVPHARIPVEKGYQVPFAAKIREEAGIMTGAVGLINEAEYADQIITRGCADLVLIGRELLRNPYWSIYARCSLDEEPNWPVPYGYAVKRQRR

SEQ ID NO: 8756 - protein, 376 aa, Oryza sativa
MDSSSGGAGGGGGAQIKGMGTHGGRYVLYNVYGNFFEVSSKYAPPIRPIGRGAYGIVCAAVNSENGEEVAIKKIGNAFDNHIDAKRTLREIKLLRHMDHENIIAIKDIIRPPRRDNFNDVYIVSELMDTDLHQIIRSNQPLTDDHCQYFLYQLLRGLKYVHSANVLHRDLKPSNLFLNANCDLKIADFGLARTTTETDLMTEYVVTRWYRAPELLLNCSQYTAAIDVWSVGCILGEIVTRQPLFPGRDYIQQLKLITELIGSPDDSSLGFLRSDNARRYMKQLPQYPRQDFRLRFRNMSAGAVDLLEKMLVFDPSRRITVDEALHHPYLASLHDINEEPTCPAPFSFDFEQPSFTEEHIKELIWRESLAFNPDPPY

SEQ ID NO: 8757 - protein, 395 aa, Legionella pneumophila str. Paris
MVFGFLNLSFWGYVLATFILTQITIASVTIYLHRNQTHRALTLHPVVSHFFRFWLWLTTGMVTADWVAIHRKHHATTDVEGDPHSPVVEGIRKVFWQGAELYREARKDRDMVAKYSHGTPTDWIERNVYSRHSSKGILLMLLLDLFFFGIPGMTVWAIQMMWIPLFAAGVINGIGHYWGYRNFECPDAATNIIPWGFWIGGEELHNNHHTFASSAKFSVKWWEFDIGWMYIRILSLFGLAKVKKLPPKLAMDEGKFHVDLDTVRAVISNRFQVMSYYYKNVIRPILKHEKNTSIETKEDKKLFQRAGRLLRREDKLLSTKAKTRLQKLLDAREQLRVVYSYKQSLQNVWLKTATTQKELVEALQQWCRQAEESGLDVLKQFAQQLKGYVPVYTRE

SEQ ID NO: 8758 - protein, 377 aa, Triticum aestivum
  misc_feature (179)..(179): Xaa can be any naturally occurring amino acid
  misc_feature (197)..(197): Xaa can be any naturally occurring amino acid
  misc_feature (205)..(205): Xaa can be any naturally occurring amino acid
  misc_feature (321)..(321): Xaa can be any naturally occurring amino acid
MGREKSRRLSGSRDFRQRLVLAMLTSTPIIIKDVRAGEGGLRPHEMSLLHLLDKVSDQHVIDVNDTGTKVGYKPGVVLGGKDLEHDCGVHRGIGYFIEPLILLGLFARSPLSIRLKGITNDTKDPSVDTFRMVTLHMLKHFGVPLRPPRPEIESRGAPPRGGGEVLLRVPNINSTLKGXNGIDEGMVKRIRGVAFSXTNVSPQIXTRILYAARGLFNKFIPDVHIFTDHRAGLSGGLSAGYGVSVVAETTTGCLISADATVSYPNVDEMSEQSKKPELMSPEDLGEQVASMLLEEVAQGGVVDSTHQGLLFMLCALCPPDXVSKVRVGQLTPHAIESLRNIKEFLDVKFIIKPDPNSNTVTLKCVGAGVKNLARKIS

SEQ ID NO: 8759 - protein, 349 aa, Sinorhizobium medicae
MSGATLEAYLASCTTHGDELSRDVAAVIQRLAKAALDIRKLVNQGALGTVFNGMHSGSNTDGDVQKDLDILCDDQFLSCLQGAPVACYASEELENPVLLDPAARLAVAIDPLDGSSNIDNNISIGTIFSVLPAAKGPDVDPSHSFLQPGNRQLAAGFFVYGPQTALVLSLGRGTDIFIFSSRLGCFVDAYKSVGIPDRANEFAINMSNYRHWEEAIRLYVDDCLAGSEGPRERDFNMRWIASLVAEAYRILVRGGIFLYPADSRKGYSHGRIRLVYEANPIAFIVENAGGSATTSVDRILDLVPESLHQRVPLVFGSRREVGRITRYHVDPNMIGERAPLFGKRGLFRA

SEQ ID NO: 8760 - protein, 187 aa, Arabidopsis thaliana
  misc_feature (38)..(38): Xaa can be any naturally occurring amino acid
  misc_feature (56)..(56): Xaa can be any naturally occurring amino acid
  misc_feature (78)..(78): Xaa can be any naturally occurring amino acid
  misc_feature (104)..(104): Xaa can be any naturally occurring amino acid
  misc_feature (129)..(129): Xaa can be any naturally occurring amino acid
  misc_feature (154)..(154): Xaa can be any naturally occurring amino acid
CWLFSQDYRHMCRRFRAHTYTLIAKSRKILFVKLHWKXPTCAINNLTDEEAKVAGXPITLHTTKRIHDTHCLLYLPYXKLLIQTWITLYQDKVDFDPLDETKHXPEDIEPVHSPGTLILNTTIDNYLQXTEQLDFNQCLVDPGIYYSNDTLLQXRIFAYGDTHRHRLEPNYLQLTINAPICAHHINH

SEQ ID NO: 8761 - protein, 628 aa, Bordetella bronchiseptica RB50
MCGVLGAWWRHHDEHEDARFAAGLRKLAHRGPDDRGSEHFAAPHGRLSLGHTRLAVIDLSAAGHQPMHADADRLAVVFNGEIYNYRELRSELRQIGAIFRGDSDTEVLLAAWQHWGVAALRRFKGMFAFALYDRRQQTLTLARDAFGIKPMYYHAAPERLLFGSELPAVQALLPHPPRLNWQRAYDYLAYGQYDQPPDTFIAGIRQLPAGHLLTLDLRTGRAGEPMAWDDPASQECRPIGFQEAAEELRARFLDNVRLHLRSDVPIGAALSGGIDSSAIVCAMRWLEPDLPIQTFSFISDDTHRSEERWVDLVNQHCGATGHKIHIAPHELLDDLDDLIRVQGEPVGSTSIYAQYRVFKLAREHGVVVTLDGQGADELLGGYGGYPTERLASLLETGRLGAAARLLRQQGRGAPARLLQAAALAAGGRHLANLRHATGRQHAPAWLDAQVLRDQGVTMREPAHAWAAATPLRGRRLVNELAHALYHRGLGALLRHGDRNSMRFSVESRVPFLTQDLAEFALSLPERYLVSDAGQTKHIFRKAMRGIVPDSILDRDDKIGFATPEQQWMQATAPQMRQWLVDAADIPFLRNAEVTAQFDAMIAGATPFSWQAWRWVNFQRWMQHATVLP

SEQ ID NO: 8762 - protein, 545 aa, Campylobacter jejuni RM1221
MAKEIIFSDEARNKLYEGVKKLNDAVKVTMGPRGRNVLIQKSFGAPSITKDGVSVAKEVELKDSLENMGASLVREVASKTADQAGDGTTTATVLAHAIFKEGLRNITAGANPIEVKRGMDKACEAIVAELKKLSREVKDKKEIAQVATISANSDEKIGNLIADAMEKVGKDGVITVEEAKSINDELNVVEGMQFDRGYLSPYFITNAEKMTVELSSPYILLFDKKIANLKDLLPVLEQIQKTGKPLLIIAEDIEGEALATLVVNKLRGVLNISAVKAPGFGDRRKAMLEDIAILTGGEVISEELGRTLESATIQDLGQASSVIIDKDNTTIVNGAGEKANIDARVNQIKAQIAETTSDYDREKLQERLAKLSGGVAVIKVGAATETEMKEKKDRVDDALSATKAAVEEGIVIGGGAALIKAKAKIKLDLQGDEAIGAAIVERALRAPLRQIAENAGFDAGVVVNSVENAKDENTGFDAAKGEYVNMLESGIIDPVKVERVALLNAVSVASMLLTTEATISEIKEDKPTMPDMSGMGGMGGMGGMM

SEQ ID NO: 8763 - protein, 364 aa, Celastrus scandens
VQSQKLAVRAISRLQSLPGGDIKLLCDTVVESVRDLTSYDRVMVYKFHEDEHGEVVAESKRPDLEPYFGLHYPSTDIPQASRFLFKQNRVRMIADCRASPVGVIQDDGLMQPLCLVGSTLRAPHGCHAQYMENMGSKSSLAMAVIINGTDEEVIGGRNATRLWGLVVCHHTSARCIPFPLRYACEFLMQAFGLQLNMELQLAAQLSEKHVLKTQTLLCDMLLRDSPTGIVTQSPSIMDLVKCDGAALYYQGKYYPIGVTPVEAQIKDIVEWLLTFHGDSTGLSTDSLADAGYPGAALLGDAVCGMAVAYITKKDFLFWFRSHTTKEIKWGGAKHHPEDKDDGQRMHPRSSFKAFLEVVKSRSLP

SEQ ID NO: 8764 - protein, 289 aa, Nicotiana tabacum
MKMEALDPSAASCFMVDVDDDLLNFSLEDETVFDDDEKTTKSITKHKHPLSSSYSSSLDSSNPVLSLLPSQQHPECVEEELEWLSNKDAFPAVEFGILADNPSIVFDHHSPVSVLENSSSTCNSSGNGSANANAYMSCCASLKVPVNYPVRARSKRRRRRQRGSFADLPSEHCMSVNKPSFKSVKQREPLLSLPLNSAKSASIGRRCQHCGADKTPQWRAGPLGPKTLCNACGVRYKSGRLLPEYRPANSPTFSPTVHSNSHRKVLEMRKQKIGVGGMMIHEACGYRVG

SEQ ID NO: 8765 - protein, 370 aa, Celastrus scandens
ALSIAGAVQSQKLAVRAISRLQSLPGGDIKLLCDTVVESVRDLTSYDRVMVYKFHEDEHGEVVAESKRPDLEPYFGLHYPSTDIPQASRFLFKQNRVRMIADCRASPVGVIQDDGLMQPLCLVGSTLRAPHGCHAQYMENMGSKSSLAMAVIINGTDEEVIGGRNATRLWGLVVCHHTSARCIPFPLRYACEFLMQAFGLQLNMELQLAAQLSEKHVLKTQTLLCDMLLRDSPTGIVTQSPSIMDLVKCDGAALYYQGKYYPIGVTPVEAQIKDIVEWLLTFHGDSTGLSTDSLADAGYPGAALLGDAVCGMAVAYITKKDFLFWFRSHTTKEIKWGGAKHHPEDKDDGQRMHPRSSFKAFLEVVKSRSL

SEQ ID NO: 8766 - protein, 374 aa, Crossopetalum rhacoma
ALSIAGAVQSQKLAVRAISQLQSLPGGDIKLLCDTVVESVRHLTGYDRVMVYKFHEDEHGEVVAERKRPDLEPYIGPHYPATDIPQASRFLFKQNRVRTIVDCHASPVRVIQDDGLMQPLCLVGSTLRAPHGCHAQYMENMGSIASLAMAVIINGNDEEVIGGRNTTRLWGLVVCHHTSARCIPFPLRYACEFLMQAFGLQLNMELQLAAQLSEKHVWKTRTLLCDMLLRDSPTGIVTQSPSIMDLVKCDGAALYYQGNYYPLGVTPTEAQITDIVGWLLDFHGDSTGLSTDSLADAGYPGAALLGDAVCGMAVAYITNRDFLFWFRSHTAKEIKWGGAKHHPEDRDDGQRMHPRSSFQAFLEVVKSRSLPWEN

SEQ ID NO: 8767 - protein, 483 aa, Zea mays
MSYNKAPSITAETINPRVKIIRYAPCGEIVKHAARLEQEIEENPASIPFQEVKTPPLCSKQVLSLCDNPALMDRDEARALFSPCSIRRARRILNSIPSKDTGGYTDCRGIKCLRQVVADGITARDGFPSTADDIFLTDGATSAINLMMQILIRSHEDGILSPLPEYPLYSASIILHGGTMVPYNLTEDNGWGLEIFEVKRCLEEARSAGLTVRAMVVINPGNPTGQVLSVTNQEEIVEFCRKEGLVILADEVYQENIYAENKKFHSFKKVARSLAYDENDLTLVSLHSVSMSYGESGRRGGYMEVSGVAANVKDQIYKVASLTLCPNIAGQILVSLAMDPPKLGDESFESFDKEKEQIRSSFCKRAKTLEKAFSGLEGVTCNKLEGALYLFPRLHLPSAAIRAADFEGVSPDIFYAHRLLDATGIAVVPGSGFHQASGTIHIRCTILPDERKIEAMVARLRAFHKAFMNEFRGSQQVMNDLRR

SEQ ID NO: 8768 - protein, 374 aa, Crossopetalum rhacoma
ALSIAGAVQSQKLAVRAISQLQSLPGGDIKLLCDTVVESVRHLTGYDRVMVYKFHEDEHGEVVAERKRPDLEPYIGPHYPATDIPQASRFLFKQNRVRTIVDCHASPVRVIQDDGLMQPLCLVGSTLRAPHGCHAQYMENMGSIASLAMAVIINGNDEEVIGGRNTTRLWGLVVCHHTSARCIPFPLRYACEFLMQAFGLQLDMELQWRAQLSKKHVWKTRTLLCDMVLRDSPTGIVTQSPSIMDLVKCDGAALYYQGNYYPLGVTPTEAQITDIVGWLLDFHGDSTGLSTDSLADAGYPGAALLGDAVCGMAVAYITNRDFLFWFRSHTAKEIKWGGAKHHPEDRDDGQRMHPRSSFQAFLEVVKSRSLPWEN

SEQ ID NO: 8769 - protein, 178 aa, Triticum aestivum
  misc_feature (33)..(33): Xaa can be any naturally occurring amino acid
  misc_feature (95)..(95): Xaa can be any naturally occurring amino acid
  misc_feature (99)..(99): Xaa can be any naturally occurring amino acid
  misc_feature (151)..(151): Xaa can be any naturally occurring amino acid
MVLSHAASAGSSDDSVHSTFASRYVRASLPKFXMPENSIPKEAAYQIINDELMLDGNPRLNLASFVTTWMEPECNKLMMDSINKNYVDMDEYPSXELQXRCVNMIAHLFNAPPGETRTPWGWAPSGFWRAHLSAGVGFRRGWGKKIKAAGXPFKKPKFYRGKISILWEKISPPFLRGA

SEQ ID NO: 8770 - protein, 374 aa, Cuervea integrifolia
ALSIAGAVQSQKLAVRAISQLQSLPGGDIKLLCDTAVESVRNLTGYDRVMVYKFHEDEHGEVVAESRRPDLEPYIGLHYPATDIPQASRFLFKQNRVRIIVDCHASPVSVIQDDGLMQPLCLVGSTLRAPHGCHAQYMENMGSIASLAMAVIINGNDEDGIGGRNPTRLWGLVVCHHTSARCIPFPLRYACEFLMQAFGLQLNMELQLAAQLLEKHVLKTQTLLCDMLLRESPTGIVTQSPSIMDLVKCDGAALYYQANYYPLGVTPTEAQIRDIVEWLLAFHGDSTGLSTDSLADAGYPGATLLGDAVCGMAVAYITNRDFLFWFRSHTAKEIKWGGAKHHPEDKDDGQRMHPRSSFKAFLEVVKSRSLPWEN

SEQ ID NO: 8771 - protein, 378 aa, Solibacter usitatus Ellin6076
MRPNEGWEGVWSSYLTVRSGSTCDTEQMLLTPLTLREVTLRNRIGVSPMCQYSSEDGFFNDWHLVHLGSRAAGGAGLVCTEATAVVPEGRISPHDAGIWKDEHIEFLTRITAFLHRHSAVAGIQLAHAGRKASVRRPWEGGTAIRESEGGWQAVAPSEIPFRDTDPTPHALSAGEIQGLVEAFAKAARRALQAGFDVVEIHGAHGYLIHEFCSPLSNQRTDQYGGSLVNRIRFALEVTEAVRSVWPAGLPVLYRISATDWVEGGWSPDDSVELARALKARGVDLIDCSSGGNSTAQKIPLVPGYQVPYAEKIRREAEIPTAAVGMITTAEQAEGIVSEGKADLVLLAREFLRDPYFPLHAAAELGEKPSPPLQYARAF

SEQ ID NO: 8772 - protein, 605 aa, Malus x domestica
MESCDCIDAQWPPDELLVKYQYISDVFIALAYFSIPLELIYFVQKSAFFPYRWVLVQFGAFIVLCGATHFINVWTFSMHTKTVAIFMTVAKVSCAVVSCATALMLVHIIPDLLSVKKRELSLKSRAEELDKEMGLMLTQEETGRHVRMLTHEIRSTLDRHTILKTTLVELGRTLGLQECALWMPSRTGMNLQLSHTLNYHIQAGSSVSMDLPVVNEVFNSSRAIRIPYTCPLARIRPLVGRYVPPEVVALRVPLLNLSNFQINDWPDVSAKSYAIMVLILPTDGTRKWREHELELVDVVPDQVAVALSHAAILEESMRARKQLTEQNDALDLAWREAEMAIHARDDFLAVMNHEMRTPMHAIIALSSLLLDTELTPEERLMIETALKSSNLLETLVNDELDLSRLEDDSLELDTERFNLHGVFREVMNLVQPVASVKKLSMTLIQSPDLPVYAVGDENRLLQTILNVAGNAVKFTKQGYISITASVAKSESSRDWQPSEFYPASTDGYFYLRVQVKDSGCGVLPEDIPHLFTKLSQPRNGSNQININNGAGLGLAICKRFVNTMGGHIWIESEGIDRGSIVAFIVQLGICDNHSDTTTHQVQIAT

SEQ ID NO: 8773 - protein, 738 aa, Mesorhizobium sp. BNC1
MSAAADAAPWRLDDPHVIGALVAGRLADPFAILGPHQTAAGLVLRVLRPEADTAEAIDPDSGSSYGKLLKRHARGFFEGLISKNTAVPRYRLRFTREGDTWDEEDAYRFPSTFGDLDLYLLGEGRHQRLYEKLGAHPMACDGVDGTRFAVWAPNASRVSVVGNFNNWDGRRHQMRLHPGIGVWEIFVPGAKPGNLYKYEIIGRNGELLPPKADPVGFRAEVPPATASVVNGLPQMEWGDGEWVEHRIGKNDRKAPISIYEVHLGSWRRHEDGRYLSYDELADRLLPYVKDLGFTHIECMPVSEHPFSGSWGYQPVGLYAPTSRFGTPEDFARFVDRCHHEGIGVIIDWVPAHFPSDAHGLARFDGTALYEHEDPRLGFHRDWNTLIYNFGRREVANFLTANALFWLDRYHVDGLRVDAVASMLYLDYSRQPGEWIPNKHGGNENLEAIAFLRETNTALFGSHPGTTSIAEESTAFPGVSRPVYAGGLGFGFKWNMGWMHDTLDYMQHEPIHRQHHHDRMTFGLIYAFSENFILPLSHDEVVHGKGSLIGRMPGDRWQKFANLRAYFTFMWTHPGKKLLFMGGEFAQEREWNHDWQLDWHHLDDPMHRGVHDLIRDLNRIYRSEPALHELDCEPEGFEWIDASDPSISTYVYMRKGTGGARPVVVACNFTPVVRENFRIGLPNAGIWREILNSDDRRYGGSDVTNGTVTATTDEPWHGRPASAILRLPPLGSVVLVGEA

SEQ ID NO: 8774 - protein, 635 aa, Mesorhizobium sp. BNC1
MAGLGGHAFSAHAGTRRPFDGCAGRPCTMTHTTFQTRWGAQLQDDDTALFRLWAPAADQLRLRFGGGEERAMERGQGGWFELEIGGLAAGTPYQFVLPDGTAVPDPASRAQAGDVHGPSLLTSRDFNWGVKDWKGRPWEEAVVYELHPGTFSPEGGSGGIRRKLDYLAEVGFTAIEIMPVAQFSGNRGWGYDGVLPYCPHSAYGGVAGLKELVDAAHERGLMMILDVVYNHFGPDGNYLSLYAPDFFDPSRDTPWGPAIRFEEPAVRAFFLDNPIYWLEEFRFDGLRFDAIDQIKDRSETPILQEIARAIRSRYPDRHIHLMTEDERNIVELHPRDDANRPILFTAEWNDDFHHAAHCVATGEDTGYYAAFADDPAGHLARALAEGFCYQGEPYAPREGKPRGVPSAGQPPAAFVDFLQNHDQIGNRAFGERLTALADADTVELLTAVLLLNPQIPLAFMGEEFGETNPFLFFTDFHGDLAKAVREGRRHEFKDFGHFSGEQAEQIPDPNALSTFEASMLDWDRVETEAGRKRLDLFRRLLQVRKVHLLPHLSDMTSMQGHSTRLGEKALSVRWRMSDRVLVMAANFGTAAVDTADGFVGCKAIYESRKGVEAALLQGELPERSVAVLITEEAGT

SEQ ID NO: 8775 - protein, 683 aa, Shewanella sp. MR-4
MRKLTLATSIATVFVGFSAWAVPPTIQISELPTLKQEAQHKVASKRVTDLYTRSHYHRFALDDAFSAQIFDRYLQQLDYRRNVLTQADVDSFKPYVNQFDDMLSSGELEPAYKMFDLVQKRRYEGFVYALSLLDKEMDFTVPGDAYEYDREDVAWPKDQAEINELWRQRVKYDALNLKLTGKKWPEIVDILQKRYNNAIKRLTQTNSEDVFQAVMNAFSRSIEPHTSYLSPRNAERFQMEMNLSLEGIGAQLQLEDDYTVIKSLIAGGPAASSEKLSPEDKIVGVGQEGGEIVDVIGWRLDDVVDLIKGPKGSKVVLQILPKKGGSNAKPFNLTLVRDKIRLEDRAATSKIIEPKDGEYANRKVGVIQIPGFYMNLSQDVEKELVKLNEAKVEGVVIDLRGNGGGALTEAVLLTGLFIDMGPVVQVRDADGRVSAHRDNDGKTTYAGPLTIMVDRYSASASEIFAAALQDYDRALIVGESSFGKGTVQQHKSLGRIYDMYEKPIGHVQYTIQKFYRINGGSTQLKGVTPNIAYPSALEPGEYGEAEEKNALPWDKVPMAQYGTLNDITPELVASLDKKHLARIQNNVEFNYINQDIADFKKHHKEKTVSLVESERIASREADEKKVLDRTNERRVAHGLAAVKSMEDIKDKDDIEAPDAFLDETAYITLDMADAKKLANAGTK

SEQ ID NO: 8776 - protein, 384 aa, Legionella pneumophila str. Lens
MMFGFLNMTLWGYLLTGFVLTHITTTAVTIYLHRYQTHRALTLHPLVSHFFRFWLWLTTGMTTAEWVAIHRKHHANTDMEGDPHSPQVFNIRKVFWQVPELYREASKDKDMIKKYSYGTPNDWIERKLYSPHANKGIFLMLALNLFLFGIPGLTLWAIQMMWIPLVAGVVNGIGHYWGYRNHESSDSSTNVFPWGLLIAGEELHNNHHTFASSAKFSIKWWEFDLGWFYIRCLSFLKLAKVKKLPPKLIIDKNKSHIDVDSVKAILGNRFQVISDYYKLVIFPTLRDMQYRIKNRDLKNARHLLKKPNEQLSHADQLRLKTLLKQHDNLQAVHNYRELLQQIWLKTSLSNKDLLNLIQKWCSQAEESGLLVLRQFASQLKSYSL

SEQ ID NO: 8777 - protein, 210 aa, Asarum europaeum
GGLLKKARELAILCDAQLGVIIFSSSGKMFEFSSPPISMREIIDRYQKLSGNCAPVYDNQQVYCEITRMKNEIDKLQATMRHFAGEDLTSLTMNEMLQLEQQLEISVNKVRSRKEQLLQQQLDNLRRKENMLEEQNRELYRVIQDHHAASMEQKMVDPSMLDHFGVFYQDDHQAARSSMLQLSPQLHPFRLQPAQPNLQDANLLPHDLQL

SEQ ID NO: 8778 - protein, 222 aa, Brassica napus
  misc_feature (166)..(166): Xaa can be any naturally occurring amino acid
  misc_feature (193)..(193): Xaa can be any naturally occurring amino acid
  misc_feature (212)..(212): Xaa can be any naturally occurring amino acid
MGKGPLSFRRLSSIRRRKKGSSVKDDPNQSSNPSSPPPPSPINAGGSVAAGTTGKVKKKAGGARLWMRFDRTGAMEVVECDKSTIIKRSSVPARDLRILGPVFSHSSNILAREKAIVVNLEVIKAIVTAEEVLLLDPLRPEVLPFIDRLKQQFPQRNALEATPNVXTFDPEAGEGLQSELPFEFQVLEMALEXVCSIVDTSVASLETDAWPXLDELTKNVST

SEQ ID NO: 8779 - protein, 210 aa, Neisseria meningitidis Z2491
MTLRYEILSVTPFRQNCTLIWDDESGEAVLTDVGGDVPFLLQALANRKLTLTAIWLTHGHLDHAGGVVEMLKTHKVPVLGPHPDDEFLLQSLPQTTAQYGFPVSPAFAPNRWLEEGETLTVGRYAFQVLHIPGHTPGHIVFYCAEAELLIAGDVLFYETIGRTDFPRGNHADLINNIRNKLFALPETVQVVAGHGRMTSIGHEKRHNPFF

SEQ ID NO: 8780 - protein, 474 aa, Desulfotalea psychrophila LSv54
MLRCYPRTEKEKRMPLHNKRKNNIMDDIYASSDLSIVLPKYKMPQKELDPRHAYQMVHDELMLDGNARQNLATFCQTWDDPEVHRLMDECIDKNMIDKDEYPQTAEIESRCVHILADLWNAPDSANSLGCSTTGSSEAAMLGGLALKKRWSEKRKAAGKGTDRPNIVCGPVQICWHKFARYWDVELREVPLEDQLYMTAEEAVKRCDENTIGVIPTLGVTFTCVYEPVEEICRALDQLQKETGLDIPVHVDGASGGFLAPFVDPDLKWDFRLKRVKSINASGHKFGLAPLGVGWVLWRDKEELPEDLIFWVNYLGGNMPTFALNFSRPGGQIIAQYYNFLRLGHEGYRKIHQACYKTAQYLSSEVKKLGPFEIIYDGRGGIPAMSFSLQEGVAPGFNLFDLSDRIRSRGWQIAAYSMPANREDLVVMRILVRHGFSRDLADLLLKDLQHCLEYFKKNPVIHQSSEEFSGSFKHS

SEQ ID NO: 8781 - protein, 492 aa, Arabidopsis thaliana
MDPYRVRPSSAHDSPFFTTNSGAPVWNNNSSLTVGTRGPILLEDYHLLEKLANFDRERIPERVVHARGASAKGFFEVTHDITQLTSADFLRGPGVQTPVIVRFSTVIHERGSPETLRDPRGFAVKFYTREGNFDLVGNNFPVFFVRDGMKFPDMVHALKPNPKSHIQENWRILDFFSHHPESLHMFSFLFDDLGIPQDYRHMEGAGVNTYMLINKAGKAHYVKFHWKPTCGIKCLSDEEAIRVGGANHSHATKDLYDSIAAGNYPQWNLFVQVMDPAHEDKFDFDPLDVTKIWPEDILPLQPVGRLVLNKNIDNFFNENEQIAFCPALVVPGIHYSDDKLLQTRIFSYADSQRHRLGPNYLQLPVNAPKCAHHNNHHDGFMNFMHRDEEVNYFPSRLDPVRHAEKYPTTPIVCSGNREKCFIGKENNFKQPGERYRSWDSDRQERFVKRFVEALSEPRVTHEIRSIWISYWSQADKSLGQKLATRLNVRPNF

SEQ ID NO: 8782 - protein, 581 aa, Glycine max
MVPSSFRPFISDDSRAKRVRVLELSRRLKHRGPDWSGLHQHGDCFLAHQRLAIVDPASGDQPLFNEDKSVIVTVNGEIYNHEELRKQLPNHNFRTGSDCDVIAHLYEEHGEDFVDMLDGIFSFVLLDTRDNSFIVARDAIGVTSLYIGWGLDGSVWISSEMKGLNDDCEHFECFPPGHLYSSKERGFRRWYNPPWFSEAIPSAPYDPLVLRHAFEQAVIKRLMTDVPFGVLLSGGLDSSLVASITSRYLANTKAAEQWGSKLHSFCVGLEGSPDLKAAKEVADYLGTVHHEFTFTVQDGIDSIEDVIYHIETYDVTTIRASTPMFLMSRKIKSLGVKWVISGEGSDEIFGGYLYFHKAPNKEEFHRETCRKIKALHQYDCLRANKSTFAWGLEARVPFLDKAFINAAMSIDPEWKMIKRDEGRIEKWILRRAFDDEEHPYLPKHILYRQKEQFSDGVGYSWIDALKAHPPKHVTEKMMLNAGNIYPHNTPKTKEAYYYRMIFERFFPQNSARLTVPGGASAACSTAKAVEWDAAWSNNLDPSGRAALGVHISAYENQNNKGVEIEKIIPMDAAPLGVAIQG

SEQ ID NO: 8783 - protein, 442 aa, Bradyrhizobium japonicum USDA 110
MLDETAGRAPGGAARWWLAQSLRALGAEIAARGGSLILRKGPAAGVIPEEARESGARAVYWNGIAQAPHQAIERRLEAALAKLGVDSQSFPGDLLVPPSAIRNKEGRGLRVFTPFWRRVLSLGDPPKPLPAPKQLRPGPKIVSDRLESWQLAPTKPDWAGGLRERWTPGEASARARLRDFLKTIARGYAGDRDRPDRVGTSGLSPHLRFGELSPRQVWHAARFAAAEDAALGPGIEKFLSELGWREFCRHLLHDHPDLATENLQTNFDGFPWQSDGKVLAAWQRGRTGYPIVDAGLRELWHTGVMHNRVRMVVASFLVKHLLIDWRDGEAWFWDTLVDADAGSNPANWQWVAGCGADAAPYFRVFNPQLQGEKFDPDGTYVRRWVPELQGLPAKLIHQPWQATPNELASAGVTLGKTYPQPIVDHARGRERALSAYAKIRKG

SEQ ID NO: 8784 - protein, 363 aa, Cuervea kappleriana
SQKLAVRAISQLQSLPGGDIKLLCDTAVESVRNLTGYDRVMVYKFHEDEHGEVVAESRRPDLEPYIGLHYPATDIPQASRFLFKQNRVRIIVDCHASPVSVIQDDGLMQPLCLVGSTLRAPHGCHAQYMENMGSIASLAMAVIINGNDEDGIGGRNATRLWGLVVCHHTSARCIPFPLRYACEFLMQAFGLQLNMELQLAAQLLEKHVLKTQTLLCDMLLRESPTGIVTQSPSIMDLVKCDGAALYYQANYYPLGVTPTEAQIRDIVEWLLAFHGDSTGLSTDSLADAGYPGATLLGDAVCGMAVAYITNRDFLFWFRSHTAKEIKWGGAKHHPEDKDDGQRMHPRSSFKAFLEVVKSRSLPG

SEQ ID NO: 8785 - protein, 364 aa, Dicarpellum baillonianum
VQSQKLAVRAISQLQSLPGGDIKLLCDTVVECVGDLTGYDRVMVYRFHEDEHGEVVAESKRPDLEPYLGLHYPATDIPQASRSLFKQNRVRMIVDCHASPVRVIQDDGLMQALCLVGSTLRAPHGCHAQYMENMGSIASLAMAVIINVNDEEATAGRNPTRLWGLVVCHHTSARCIPFPLRYACEFIMQAFGLQLNMELQLAAQLLEKHVLKTQTLLCDMLLRDSPTGIVTQSPSIMNLVKCDGAALYYQGNYYPLGVTPAEAQIKDIVEWLLAFHGDSTGLSTDSLADAGYPGAALLGDAVCGMAVAYITNRDFLFWFRSHTAKETKWGGAKHHPEDKDDGQRMHPRSSFKAFLEVVKSRSLP

SEQ ID NO: 8786 - protein, 362 aa, Dicarpellum baillonianum
QSQKLAVRAISQLQSLPGGDIKLLCDTVVECVGDLTGYDRVMVYRFHEDEHGEVVAESKRPDLEPYLGLHYPATDIPQASRSLFKQNRVRMIVDCHASPVRVIQDDGLMQALCLVGSTLRAPHGCHAQYMENMGSIASLAMAVIINVNDEEATAGRNPTRLWGLVVCHHTSARCIPFPLRYACEFIMQAFGLQLNMELQLAAQLLEKHVLKTQTLLCDMLLRDSPTGIVTQSPSIMNLVKCDGAALYYQGNYYPLGVTPAEAQIKDIVEWLLAFHGDSTGLSTDSLADAGYPGAALLGDAVCGMAVAYITNRDFLFWFRSHTAKETKWGGAKHHPEDKDDGQRMHPRSSFKAFLEVVKSRSL

SEQ ID NO: 8787 - protein, 548 aa, Vibrio fischeri ES114
MAAKDVKFGNDARIKMLEGVNVLADAVKVTLGPKGRNVVLDKSFGAPTITKDGVSVAREIELEDKFQNMGAQMVKEVASQANDAAGDGTTTATVLAQAIITEGLKAVAAGMNPMDLKRGIDKAVVAAVEELKALSVPCADTKAIAQVGTISANSDSTVGNLIAEAMDKVGRDGVITVEEGQALQDELDVVEGMQFDRGYLSPYFVNNQEAGSVDLESPFILLVDKKVSNIRELLPTLEAVAKASRPLLIIAEDVEGEALATLVVNNMRGIVKVAAVKAPGFGDRRKAMLQDIAVLTAGSVISEEIGLELEKVVLEDLGQAKRVTITKETTTIIDGSGEETIIQGRVSQIRQQIEDATSDYDKEKLQERVAKLAGGVAVIKVGAATEVEMKEKKDRVEDALHATRAAVEEGVVAGGGVALIRVASKVAGLVGDNEEQNVGIRVALRAMEAPIRQITKNAGEEDSVVANNVKAGEGSYGYNAATGEYGDMIEMGILDPTKVTRSALQFAASVAGLMITTEAMVTDKPQDSGSAMPDMGGMGGMGGMGGMM

SEQ ID NO: 8788 - protein, 365 aa, Dicarpellum pancheri
QSQKLAVRAISQLQSLPGGDIKLLCDTVVECVGDLTGYDRVMVYRFHEDEHGEVVAESKRPDLEPYLGLHYPATDIPQASRFLFKQNRVRMIVDCHASPVRVIQDDGLMQALCLVGSTLRAPHGCHAQYMENMGSIASLAMAVIINGNDEEATAGRNPTRLWGLVGCHHTSARCIPFPLRYACEFIMQAFGLQLNMELQLAAQLLEKHVLKTQTLLCDMLLRDSPTGIVTQSPSIMNLVKCDGAALYYQGNYYPLGVTPAEAQIKDIVEWLLAFHGDSTGLSTDSLADAGYPGAALLGDAVCGMAVAYITNRDFLFWFRSHTAKETKWGGAKHHPEDKDDGQRMHPRSSFKAFLEVVKSRSLPGR

SEQ ID NO: 8789 - protein, 550 aa, Brassica rapa subsp. pekinensis
LTMKLLHGLALVFLLAAASCKADEEITCEENNPFTCSNTDILSSKNFGKDFIFGVASSAYQIEGGRGRGVNIWDGFSHRYPEKSGSDLKNGDTTCESYTRWQKDVDVMGELNATGYRFSFAWSRIIPKGKVSRGVNQGGLDYYHKLLDALLEKNITPFVTLFHWDLPQTLQDEYEGFLDRQIIQDFKDYADLCFKEFGGKVKHWITINQLYTVPTRGYAVGTDAPGRCSPMVDTKHRCYGGNSSTEPYIVAHNQLLAHATVVDLYRTKYKFQKGKIGPVMITRWFLPFDESDPASIEAAERMNQFFHGWYMEPLTKGRYPDIMRQIVGSRLPNFTEEEAELVAGSYDFLGLNYYVTQYAQPKPNPYPSETHTAMMDAGVKLTYDNSRGEFLGPLFVEDKVNGNSYYYPKGIYYVMDYFKTKYGDPLIYVTENGFSTPSSENREQAIADYKRIDYLCSHLCFLRKVIKEKGVNVRGYFAWALGDNYEFCKGFTVRFGLSYVNWEDLDDRNLKESGKWYQRFINGTVKNAVKQDFLRSSLSSQSQKKRFADA

SEQ ID NO: 8790 - protein, 364 aa, Dicarpellum pancheri
VQSQKLAVRAISQLQSLPGGDIKLLCDTVVECVGDLTGYDRVMVYRFHEDEHGEVVAESKRPDLEPYLGLHYPATDIPQASRFLFKQNRVRMIVDCHASPVRVIQDDGLMQALCLVGSTLRAPHGCHAQYMENMGSIASLAMAVIINGNDEEATAGRNPTRLWGLVGCHHTSARCIPFPLRYACEFIMQAFGLQLNMELQLAAQLLEKHVLKTQTLLCDMLLRDSPTGIVTQSPSIMNLVKCDGAALYYQGNYYPLGVTPAEAQIKDIVEWLLAFHGDSTGLSTDSLADAGYPGAALLGDAVCGMAVAYITNRDFLFWFRSHTAKETKWGGAKHHPEDKDDGQRMHPRSSFKAFLEVVKSRSLP

SEQ ID NO: 8791 - protein, 461 aa, Burkholderia fungorum LB400
MTFLKSPPPTPDAVADEYAAMISGSSLPKYRIPEASSDRRAVFDLVRDELFMDGNSRQNVATFCTTYADDEVRRLMDLSIDKNMIDKDEYPQTAEIEMRCVHMLADLWHATKSWKTTGCSTTGSSEACMLGGLALKWQWKKRREAQGKPTGKPNFVCGPVQVCWAKFARYFDVEMRQVPLSGDATGLRPEDLAQYCDENTIGVVATLGITFTCVYEPVKALAGALDALQANVGLDIPIHVDAASGGFVAPFIQPDLEWDFSVPRVKSINASGHKYGLAPLGVGWIVWRSTQDLPDELIFRVDYLGGDMPTFALNFSRPAGQIIAQYYMLLRLGREGYRHIQQECADTAQALADGLAKIDALDMIYDGRGALPAVCYKLKHPDTAGFTLFDLSDRVRMRGWQIASYELPAGREDTIVQRVLIRRGVTRDMAAMLLEDIKHAIAHLTKNPVPNSTAGPTFHHD

SEQ ID NO: 8792 - protein, 451 aa, Exiguobacterium sp. 255-15
MNIICWIRSDFRLEDNHMLARAVEYLEKDEQANVEFVFWVNPDYIGEYDARQQYFFQALEHFAKNCKTHDMPIRFIEGQEKDFLEATEMADVLLFNAEYVEPFKSRDDGIMKKRGDKKTERLLDRHLLHPHAVKKNDGSYYKVFTPYKNAFLKKDVDKPYPVKLNLLKERYHKRRQNNAFMLDYFKRAASDTDFAVGEETARKRLRSFLKNNLSAYEEQRDLPAVDGTSLMSRYLRTGEIGIRTIFDAVQQEQDSKGKQTYLTELIWREFYYTILMHYPESKRLPVNEQYTKIEWETDEKGFKAWAEGKTGYPIVDAAMRQLNTTGWMHNRLRMIVASFLTKDLLVDWQKGERYFQQKLVDYEAASNIGGWQWAASVGTDAVPYFRVFNPTTQSKKFDKDGTFIRTYLPELKDLPKTSIHEPTEQQRKDYDYPMPIVEHDMARKRAIARFK

SEQ ID NO: 8793 - protein, 366 aa, Eurotium herbariorum
MAEFVRATIFGTTFEITSRYTELQPVGMGAFGLVCAARDQLTGAPVAVKKIMKPFSTPVLSKRTYRELKLLKHLGHENIICLSDIFISPLEDIYSVTELLGTDLHRLLTSRPLEKQFIQYFLYQILRGLKYVHSAGVVHRDLKPSNILINENCDLKICGFGLARVQDPQMTGYVSTRYYRAPEIMLTWQKYDVEVDIWSAGCIFAEMLDGKPLFPGKDHVNQFSIITELLGTPPDDVIETICSENTLRFVKSLPKRERQPLTSRFKNADPEAVDLLERMLVFDPKKRIRAGEALAHEYLAPYHDPTDEPEAQEKFDWSFNDADLPVDTWRIMMYSEILDFHNIDQSEDAGQVLVEGVGDGQQAFAA

SEQ ID NO: 8794 - protein, 720 aa, Chlamydophila pneumoniae AR39
MVDKLIHPWDLDLLVSGRQKDPHKLLGILASEDSSDHIVIFRPGAHTVAIELLGELHHAVAYRSGLFFLSVPKGIGHGDYRVYHQNGLLAHDPYAFPPLWGEIDSFLFHRGTHYRIYERMGAIPMEVQGISGVLFVLWAPHAQRVSVVGDFNFWHGLVNPLRKISDQGIWELFVPGLGEGIRYKWEIVTQSGNVIVKTDPYGKSFDPPPQGTARVADSESYSWSDHRWMERRSKQSEGPVTIYEVHLGSWQWQEGRPLSYSEMAHRLASYCKEMHYTHVELLPITEHPLNESWGYQVTGYYAPTSRYGTLQEFQYFVDYLHKENIGIILDWVPGHFPVDAFALASFDGEPLYEYTGHSQALHPHWNTFTFDYSRHEVTNFLLGSALFWLDKMHIDGLRVDAVASMLYRDYGREDGEWTPNIYGGKENLESIEFLKHLNSVIHKEFSGVLTFAEESTAFPGVTKDVDQGGLGFDYKWNLGWMHDTFHYFMKDPMYRKYHQKDLTFSLWYAFQESFILPLSHDEVVHGKGSLVNKLPGDTWTRFAQMRVLLSYQICLPGKKLLFMGGEFGQYGEWSPDRPLDWELLNHHYHKTLRNCVSALNALYIHQPYLWMQESSQECFHWVDFHDIENNVIAYYRFAGSNRSSALLCVHHFSASTFPSYVLRCEGVKHCELLLNTDDESFGGSGKGNRAPVVCQDQGVAWGLDIELPPLATVIYLVTFF

SEQ ID NO: 8795 - protein, 710 aa, Desulfotalea psychrophila LSv54
MKLMKSFFFSVLVLLFLSPVLHADSLTAEEQERDSLIGHMLSKQLPTLHYSDKELNDSLGEAAFSLYLKQLDYQKRFLLQEDVDVLHSHADSIDDNMRSGQVVLPSLGSEILLKRVAQVQQMVTKMVAAEIGHTPGEVYQSDPKKLSYAKSLAELEDRWRKILKAQVMSRYLDLEEEAQAAKGADLAGKKSGEGTRKSVSSNFKKMWAEATEKVAKQNKTFLHRLTQETLQDHTDRFFNSVARAFGPHTNYIPPASKEQFDINMRGSLEGIGALLKEEDGMIKVVRVIPGSASARQGGLEIEDAILSVGQGDEEPVDVSDMRLRDAVRLIRGAKGTEVRLTVRKNGGLKSVVPIIRDVVQMEDTFVKSLVVKGDDGARIGYINIPSFYRDFEKSKKGEKGRNSTDDTRVEVLKLKALGVDGIVLDLRNNGGGALVDAIDIAGLFVKEGPMVQVRTSMGDKRILFDQDEGIVYAGPLVILVNKFSASASEIVAAALQDYHRAVIMGGAHTHGKGSVQTVLDLNEYVPWLSMANYEDLGALKIMIQKFYRVNGGSTQYKGVEPDIVLPSIYEHLKSGERYLDYSLPWDSIEAIDYTTFSLSPDIEKIRKNSLVRVKKNKEFDIIRDEVAKAEERSLDTYIYLDIERMRGDRRMAKAARKRLGAEVGLLEEEPKSTISETEAEKESHWRQGVSRDPWVQEAGRVIADIGRQVS

SEQ ID NO: 8796 - protein, 492 aa, Acacia ampliceps
MDPYKYRPSSTFNTPFWTTNSGTPVYNNDSALTIGSRGPILLEDYHLVEKIANFTRERTPERVVHARGASAKGFFEVTHDITHLTCADFLRGPGVQTPVIVRFSTVIHERGSPETIRDPRGFAVKFYTREGNFDLVGNNFPVFFIRDGMKFPDVIHAFKPNPKSHIQEYWRVLDFCSYLPESLHTFMFLFDDVGVPQDYRHMEGSSVNTYTLINKAGKVHYVKFHWKPTLGVKCLLEEEAIRVGGANHSHATQDLYDSIAAGNYPEWKLYIQTIDPDFEDRFDFDPLDGTKTWPEDLVPLQPVGRLVLNRNIDNFFAENEQLAFSPSLVVPGIYFSDDKVLQARIFAYGDTQRHRIGPNYLQLPVNAPKCAHHNNHYDGTMNFMHRDEEVDYFPSRYDTARHAEKFPIPPVNLIGRRDRRIIEKENNFKQPGDLYRTWAPDRQERFIRRWIGVLSDPKVTHEVRSIWISYLSQADRSLGQKVASHLNMRPSI

SEQ ID NO: 8797 - protein, 692 aa, Saccharomyces cerevisiae
MGNSSSKSSKKDSHSNSSSRNPRPQVSRTETSHSVKSAKSNKSSRSRRSLPSSSTTNTNSNVPDPSTPSKPNLEVNHQRHSSHTNRYHFPSSSHSHSNSQNELLTTPSSSSTKRPSTSRRSSYNTKAAADLPPSMIQMEPKSPILKTNNSSTHVSKHKSSYSSTYYENALTDDDNDDKDNDISHTKRFSRSSNSRPSSIRSGSVSRRKSDVTHEEPNNGSYSSNNQENYLVQALTRSNSHASSLHSRKSSFGSDGNTAYSTPLNSPGLSKLTDHSGEYFTSNSTSSLNHHSSRDIYPSKHISNDDDIENSSQLSNIHASMENVNDKNNNITDSKKDPNEEFNDIMQSSGNKNAPKKFKKPIDIDETIQKLLDAGYAAKRTKNVCLKNNEILQICIKAREIFLSQPSLLELSPPVKIVGDVHGQYGDLLRLFTKCGFPPSSNYLFLGDYVDRGKQSLETILLLFCYKIKYPENFFLLRGNHECANVTRVYGFYDECKRRCNIKIWKTFIDTFNTLPLAAIVAGKIFCVHGGLSPVLNSMDEIRHVVRPTDVPDFGLINDLLWSDPTDSPNEWEDNERGVSYCYNKVAINKFLNKFGFDLVCRAHMVVEDGYEFFNDRSLVTVFSAPNYCGEFDNWGAVMSVSEGLLCSFELLDPLDSAALKQVMKKGRQERKLANQQQQMMETSITNDNESQQ

SEQ ID NO: 8798 - protein, 548 aa, Brassica rapa subsp. pekinensis
MKLLHGLALVFLLAAASCKADEEITCEENNPFTCSNTDILSSKNFGKDFIFGVASSAYQIEGGRGRGVNIWDGFSHRYPEKSGSDLKNGDTTCESYTRWQKDVDVMGELNATGYRFSFAWSRIIPKGKVSRGVNQGGLDYYHKLIDALLEKNITPFVTLFHWDLPQTLQDEYEGFLDRQIIQDFKDYADLCFKEFGGKVKHWITINQLYTVPTRGYAVGTDAPGRCSPMVDTKHRCYGGNSSTEPYIVAHNQLLAHATVVDLYRTKYKFQKGKIGPVMITRWFLPFDESDPASIEAAERMNQFFHGWYMEPLTKGRYPDIMRQIVGSRLPNFTDQEAALVAGSYDFLGLNYYVTQYAQPKPNPYPSETHTAMMDAGVKLTYDNSRGEFLGPLFVEDKVNGNSYYYPKGIYYVMDYFKTKYGDPLIYVTENGFSTPSEENREQAIADYKRIDYLCSHLCFLRKVIKEKGVNVRGYFAWALGDNYEFCKGFTVRFGLSYVNWEDLDDRNLKESGKWYQRFINGTVKNAVKQDFLRSSLSSQSQKKRFADA

SEQ ID NO: 8799 - protein, 361 aa, Elaeodendron orientale
QKLAVRAISQLQSLPGGDIKLLCDTVVECVRDLTGYDRVMVYKFHEDEHGEVVAESKRPDLEPYIGLHYPSTDIPQASRFLFKQNRVRIIVDCHASPVCVIQDDGLMQPLCLVGSTLRAPHGCHAQYMENMGSIASLAMAVVINGNDEEVIRGKNLTRLWGLVVCHHTSARCIPFPLRYACEFLMQAVGLQLNMELQLAAQLLEKHVLKTQTLLCDMLLRDSPIGIVTQSPSIMDLVKCDGAALYYQGNYYPLGVTPSEVQIKDIVEWLLAFHGDSTGLSTDSLADAGYPRAALLGDAVCGMAVAYITNRDFLFWFRSHTAKEIKWGGAKHHPEEKDDGQRMHPRSSFKAFLEVVKSRSLP

SEQ ID NO: 8800 - protein, 362 aa, Elaeodendron orientale
QSQKLAVRAISQLQSLPGGDIKLLCDTVVECVRDLTGYDRVMVYKFHEDEHGEVVAESKRPDLEPYIGLHYPSTDIPQASRFLFKQNRVRIIVDCHASPVCVIQDDGLMQPLCLVGSTLRAPHGCHAQYMENMGSIASLAMAVVINGNDEEVIRGKNLTRLWGLVVCHHTSARCIPFPLRYACEFLMQAVGLQLNMELQLAAQLLEKHVLKTQTLLCDMLLRDSPIGIVTQSPSIMDLVKCDGAALYYQGNYYPLGVTPSEVQIKDIVEWLLAFHGDSTGLSTDSLADAGYPRAALLGDAVCGMAVAYITNRDFLFWFRSHTAKEIKWGGAKHHPEEKDDGQRMHPRSSFKAFLEVVKSRSC

SEQ ID NO: 8801 - protein, 1307 aa, Magnaporthe grisea 70-15
MADAATLAAVAAIVENIATNSGAPGKNASFRSSTYVQLPGPESDEKKQLERELAALVIRVQQLETRANAAPATIFPDTPNETAYSLFGDDSSSPTSSSSGREPKRLKSASSTTRNGFTTDGRPSKLNAITDEELEGLREHVDGQSRLLDSQRAELDGVNAQLLEQKQLQERALAIIEQERVATLERELWKHQKANEAFQKALREIGSIVTAAARGDLSKRVKINPIEMDPEITTFKRTMNAMMDQLGVFSSEVSRVAREVGTEGILGGQAQIEGVDGTWKELTDNVNVMAQNLTDQVREIASVTTAVAHGDLTQKIESAAKGEILQLQQTINTMVDQLRTFASEVTRVARDVGTEGMLGGQADVEGVKGMWNELTVNVNAMANNLTTQVRDIINVTTAVAKGDLTQKVQAECRGEIFELKNTINSMVDQLQQFAREVTKIAREVGTEGRLGGQATVHDVQGTWRDLTENVNGMAMNLTTQVREIANVTSAVAAGDLSKKIRVEVKGEILDLKNTINTMVDRLGTFAFEVSKVARAVGTDGTLGGQAQVENVEGKWKDLTENVNTMASNLTSQVRGISTVTQAIANGDMSRKIDVEAKGEILILKETINNMVDRLSIFCNEVQRVAKDVGVDGIMGGQADVAGLKGRWKEITTDVNTMANNLTAQVRAFGDITNAATDGDFTKLVEVEASGEMDELKRKINQMVYNLRDSIQRNTQAREAAELANKTKSEFLANMSHEIRTPMNGIIGMTQLTLDTDLTQYQREMLNIVNNLAMSLLTIIDDILDLSKIEAKRMVIEEIPYTLRGTVFNALKTLAVKANDKFLDLTYRVDSSVPDHVIGDSFRLRQIILNLVGNAIKFTEHGEVSLTIQKGNDVTCLPNEYMIEFVVSDTGIGIPTDKLGLIFDTFQQADGSMTRKFGGTGLGLSISKRLVNLMGGDVWVKSQYGKGSSFYFTCRVRLADVDISLIRKQLKPYKGHQVLFIDKGKTGHGPEVGQMLGQLGLVPIVLESEQNHTLTRVRGKECPYDVIVVDSIDTARRLRGIDDFKYLPIVLLAPTVHVSLKSCLDLGITSYMTMPCKLIDLGNGMVPALENRATPSLSDNTKSFEILLAEDNTVNQRLAVKILEKYNHVVTVVSNGAEALEAVKDNKYDVILMDVQMPVMGGFEATAKIREYERSLGTQRTPIIALTAHAMMGDREKCIEAQMDEYLSKPLQQNHLIQTILKCATLGGALLEQNRERELELARHAEHKGGLSTDPARASSVMRPPLHHRPVTTAESLSGGAESPSLMANDGEDPIQRARSSLSEPGCL

SEQ ID NO: 8802 - protein, 374 aa, Elaeodendron xylocarpum
ALSIAGAVQSQKLAVCAISQLQSLPGGDIKLLCDTVVESVGDLTGYDRVMVYKFHEDEHGEVVAESKRPDLEPYIGLHYPSTDIPQASRFLFKQNRVRIIVDCHASPVRVIQDGGLTQPLCLVGSTLRAPHGCHAQYMENMGSIASLAMAVVINGNDEEVIGGRNPTRLWGLVVCHHTSARCIPFPLRYACEFLMQAFGLQLNMELQLAAQLLEKHVLKTQTLLCDMLLRDSPIGIVTQSPSIMDLVKCDGAALYYQGNYYPLGVTPSEAQIKDIVEWLLAFHGDSTGLSTDSLADAGYPGAALLGDAVCGMAVAYITNRDFLFWFRSHTAKEIKWGGAKHHPEDEDDGERMHPRSSFKAFLEVVKSRSLPWEN

SEQ ID NO: 8803 - protein, 206 aa, Brassica napus
MPSRRRTLLKVIILGDSGVGKTSLMNQYVNKKFSNQYKATIGADFLTKEVQFEDRLFTLQIWDTAGQERFQSLGVAFYRGADCCVLVYDVNSMKSFDNLNNWREEFLIQASPSDPENFPFVVIGNKVDVDGGNSRVVSEKKAKAWCASKGNIPYFETSAKEGTNVEEAFECIAKNALKSGEEEELYLPDTIDVGTSNQQRSTGCEC

SEQ ID NO: 8804 - protein, 1014 aa, Synechocystis sp. PCC 6803
MSPSQPHPPIATFEPESFLILVVDDVKENIYVISELLEGEGYSTTFVTSGPEALQRVTQAQPDLILLDLMMPGMDGLEVCDRLKQDPQTRDIPVIFLTASNEKQDLLQAFAKGAVDYVTKPFSPPELLARVKTHLELKQTRDNLHHTLLEQARTAEALACTSTRLGILVQNMQAGVLMTDAQGTIVVVNPEFARLFNLGFPADLLLGKNLTAIAPRINGLISHGQGVTHNFLAIESPEPLLKVELALEDGRFFERDYVPIMLGDSSQGHFWLYRDISQRKQVEMIQGQSLEMERRMRQQLAEQNQELVAATTAAEAANRSKSEFLATMSHEIRTPMNAIIGMTGLLLDTDLTTQQKYFAQTIRNSGETLLTLINDILDFSKIEAGKLDLEVYPFDLGQCLEEALDVVVPSARQKSLTLIRRFLTPIPPNLQGDVTRLRQILVNLLSNAVKFTEAGQVKVTVEVVDHDAAKGEYQICFAVQDTGIGIAPNQQQALFQAFSQGNSSITRRFGGTGLGLAICVRLTALMGGTIWAESNGCVVGNPPELWQIGQPTIEGSTFYFTVNLTVLPSCAYSVHNLRHSLFIGRSVLVADYDEGRGTRMRNLLASWRLQAEQITFSSPAKLGEDLKSRLTQKNYGALILHCPYPEGRGKQFTDFDLGKITTWAPTEQDIPVLVATDIYLSPGERYSGDKPPVQAWIKSPINPDELENTLVDVLGQTEPPTLVSTEAISGPLFPYSSSNLTILLAEDNLINQQVAKLLLKKLGYPVDVVNNGQEALSALAKGDYDVVLMDVEMPEMDGLTATEHIRRSQGRSERPWIIAVTAYSMEGDRERCLASGMNDYVSKPIRLEALQQALQVAATALQSTSQDRMATVSCVSAFEAKPSPSSPCPEDPAGTTLPPIDQDIICSLRDLDRENGQLILREIIDIYCQTAPELLQRIKLAIANQDWGNLSSAAHTLGSSSANLGAVLLAQQAKTLENLTRQRDSRAMDPGHFPTLAASYERVQGELKTMLDRL

SEQ ID NO: 8805 - protein, 374 aa, Elaeodendron xylocarpum
ALSIAGAVQSQKLAVRAISQLQSLPGGDIKLLCDTVVESVRDLTSYDRVMVYKFHEDEHGEVVAESKRPDLEPYIGLHYPSTDIPQASRFLFKQNRVRIIVDCHASPVRVIQDGGLTQPLCLVGSTLRAPHGCHAQYMENMGSIASLAMAVVINGNDEEVIGGRNPTRLWGLVVCHHTSARCIPFPLRYACEFLMQAFGLQLNMELQLAAQLLEKHVLKTQTLLCDMLLRDSPIGIVTQSPSIMDLVKCDGAALYYQGNYYPLGVTPSEAQIKDIVEWLLAFHGDSTGLSTDSLADAGYPGAALLGDAVCGMAVAYITNRDFLFWFRSHTAKEIKWGGAKHHPEDKDDGERMHPRSSFKAFLEVVKSRSLPWEN

SEQ ID NO: 8806 - protein, 379 aa, Kineococcus radiotolerans SRS30216
MAKLLEPLTLRGTTFANRIWASPTCQYSCDPDLAPGVPTDWHLVHLGGLAVGGCGLVLTEAAAVVPEGRITPQDAGLWNEEQTRAWTRVVDFAHSQGVAIGVQLAHAGRKASTHRPWAEQQGSVPPAEGGWETVGPSALAFGDHAVPTALDEAGLERVVTAFADAARRAETAGFDVVELHAAHGYLLHQFLSPLSNHRTDGYGGDLAGRSRLLLEVLDAVRAVWPRDKPVLVRLSTSDWVEGGWDVAESVELTRELAARGADLVDASSGGNDPRQRIPVGPGYQVPAAARIRRETGVPVAAVGLILEPAQAEQVLVSGDADAVFLARPLLADPRWPQRAAQALHAPEAVAWPPQYVRATRAPVPHVSPRQARRGADGTP

SEQ ID NO: 8807 - protein, 374 aa, Euonymus alatus
ALSIAGAVQSQKLAVRAISQLQSLPGGDIKLLCDTVVETVRDLTGYDRVMVYKFHDDEHGEVVAENKKPDLEPYIGLHYPATDIPQASRFLFKQNRVRMIVDCHASTVRVIQDDRLVQPLCLVGSTLRAPHGCHAQYMENMGSQASLALAVISNGNDEEVIGGRNATRLWGLVVCHHTSARCIPFLFRYACEFLMQAFGLQLNMELQLAAQVSEKHVLKTQTLLCDMFLRDSPTGIVTKSPSIMDLVKCDGAAFYYQGKYYPLGVTPAEAQIKDIVEWLLAFHGDSTGLSTDSLADAGYPAAASLGDSVCGMAVAYITNRDFLFWFRSHTTEEIKWGGAKHHHEDKDDGQRMHPRSSFKAFLEVVKSRSFPWEN

SEQ ID NO: 8808 - protein, 604 aa, Wolinella succinogenes
MCSICGGTIKPSLIQKASDTMRHRGPDARSFWSDGKISLAHNRLSILDLSEAGNQPFGDERYRLIFNGEIYNFQELSSDYGLRLQSSSDTEVLWRLLILEGERILPRLNGMFSFLFYDGHKGEILMARDRFGKKPLFYFHEGKELGVASEIKALRAILGEKGALDQGALLDYLSYLAPCGEKSFFPTIHKLPAGCLARFSLSEGRLEKSSFYSLPSAPSRENIEEKEALRKIEELLVESVRYRLLSDVPVASFLSGGIDSSLISALYARLSPCSIETFSIGYDEYKHYDELPYAREVASHIGSIHHEKIATRKDFLEAFEEVLPILDEPLGDPAIIPTYLLSKEVAKSGFKVVLSGEGSDEIFFGYDGYFDSLKLLWLENSLGLKEKAILLDYHRKSEHGGKEWERLRRLLMDEKPYFRGINESWTPGQRARLFKQEPAWRDPILETFQDFPSKEGEGWYSYIDLKHWMAEVLMSKMDRMSMAHSLESRAPFLDYQLVDFVLSLPSSLRTGEITKNLLKKIALAYLPDSIVNRRKKGFSSPMFEWYFEAYQGRILEDYQRVNRELGWFEDSYLKFLYEKGRMGEYKSQNWGMILFSRWFLIHCG

SEQ ID NO: 8809 - protein, 908 aa, Zea mays
  misc_feature (274)..(274): Xaa can be any naturally occurring amino acid
IRHEGYDRVMAYKFHEDEHGEVFAEITKPGIEPYIGLHYPATDIPQAARFLFMKNKVRMICDCRARSVKIIEDEALSIDISLCGSTLRAPHSCHLKYMENMNSIASLVMAVVVNENEEDDEPEPEQPPQQQKKKRLWGLIVCHHESPRYVPFPLRYACEFLAQVFAVHVNKEFELEKQIREKSILRMQTMLSDMLFKESSPLSIVSGSPNIMDLVKCDGAALLYGDKVWRLQTAPTESQIRDIAFWLSEVHGDSTGLSTDRLQDAGSLVPPPPXHPGAASLGDMICGMAVAKITSKDILFWFRSHTAAEIKWGGAKHDPSDKDDNRRMHPRLSFKAFLEVVKTKSLPWSDYEMDAIHSLQLILRGTLNDASKPAQASGLDNQIGDLKLDGLAELQAVTSEMVRLMETATVPILAVDGNGLVNGWNQKVAELSGLRVDEAIGRHILTLVEDSSVPIVQRMLYLALQGREEKEVRFELKTHGSKRDDGPVILVVNACASRDMHDHVVGVCFVAQDMTVHKLVMDKFTRVEGDYRAIIHNPNPLIPPIFGADQFGWCSEWNAAMTKLTGWHRDEVIDRMLLGEVFDSSNASCLLKSKDAFVRLCIIINSALAGEEAEKAPIGFFDRDGKYIECLLSVNRKVNADGVVTGVFCFIHVPSDDLQHALHVQQASEQTALRRLKAFSYMRHAIDKPLSGMLYSRETLKGTGLDEEQMRQVRVADNCHRQLNKILADLDQDNITDKSSCLDLDMAEFVLQDVVVSAVSQVLIGCQGKGIRVACNLPERSMKQKVYGDGIRLQQILSDFLFVSVKFSPAGGSVDISSKLTKNSIGENLHLIDFELRIKHQGAGVPAEILSQMYGEDNREQSEEGLSLLVSRNLLRLMNGDIRHLREAGMSTFILTAELAAAPSAAGH

SEQ ID NO: 8810 - protein, 294 aa, uncultured proteobacterium
MSDTKLNTLEQPEVMAFFDAQTNTISYIVKDPSSTACAVIDSVMNMDYAAGRITFESADEIVKTIKDQGLELQWIVETHVHADHLSAAPYLQEQLGGKIGISEKIIQVQDTFGKIFNEGTAFQRDGSQFDALFEDGDSYHVGQMQATVIATPGHTPACMVHVMGDAAFVGDTLFMPDGGSARADFPGGDAGILYDSIQKVLSLPDETRLFMCHDYGPNGRDIQWETTVAEERAFNIHVGGDATRESFVKMRTERDATLAMPKLIIPALQVNMRAGEVPTDEDGHPSLKVPINSL

SEQ ID NO: 8811 - protein, 571 aa, Aspergillus nidulans FGSC A4
MCGIFACHHHPDVQAFKPTALRMAKAVRHRGPDWSGSFIADKTILCHERLCIVGVDSGAQPLVNDDESLALAVNGEIYNHRIVRKTLDVEYNYKTHSDCEVIIPLYMKYGLDAPKHLDGMFAWVLYDKKEDRVIAARDPIGICSFYIGWSSQTPGAVYFASELKSLHPVCDKVEAFPPGHVFDSKSGEFSRYFQPSWWDPTNVPSTPVDYKAIRESLTRSVRKRLMAEVPYGVLLSGGLDSSLVASIAQRETLRMQKASSGVKSEANGELVGIDDENELSTVNSFQQLQSFSIGLPGAPDTEAAMEVAKFLGTKHHALTFTIEDGLNALSDVIYHLETYDVTTIRASTPMYLLSRKIKGLGVKMVLSGEGSDEIFGGYLYFHAAPNKEEFHKETVRRVKNLHLADCLRANKSTSAWGLEARVPFLDKAFIETSMSVDPQEKMITKDRIEKYILRKAFDTSDEPDVEPYLPDKILWRQKEQFSDGVGYSWIDGLKDHAELHVTDEMMKNPKPEWGDDIPTTKEAYWYRMMFDEHFPSYCASTVERWVPTWSKQSDPSGRAIATHNAKYDDAE

SEQ ID NO: 8812 - protein, 545 aa, Borrelia garinii PBi
MAKDIYFNEDARKSLLSGVEKLSNAVKVTLGPKGRNVLIDKKFGSPTVTKDGVSVAREIELENPFENMGAQLLKEVAIKTNDVAGDGTTTATVLAYAIAREGLKNVSSGINPIGIKKGIDHAVNLAAEKIRQSAKKITTKEEIAQVASISANNDSYIGEKIAEAMDKVGKDGVITVEESKTFDTTISYVEGMQFDRGYLSPYFSTNKENMSVSFDDAFILIYEKKISSIKELLPVLEKVLGTNKPLLIIAEDIEGDALAALVLNSVRGALKVCAIKSPGFGDRRKAMLEDIAVLTGGVLISEELGITLETVEIEQLGQAKTIKVDKDNTTIINTGNKEQIKERSELIKKQIEDSTSEYDKEKLQERLAKLVGGVAVINVGAVTEVELKEKKHRVEDALSATRAAVEEGVVPGGGSTLIEVAMYLDTIDTSKLSYEEKQGFEIVKRSLEEPMRQIISNAGFEGSIYIHQIKTEKKGLGFDASSFKWVNMIESGIIDPAKVTRSALQNAASIAGLLLTTECAITDIKEEKNTSGGGGYPMDPGMGMM

SEQ ID NO: 8813 - protein, 479 aa, Agrobacterium tumefaciens str. C58; identical to SEQ ID NO: 101

SEQ ID NO: 8814 - protein, 539 aa, Streptococcus thermophilus CNRZ1066
MAKDIKFSSDARAAMVRGVDTLADTVKVTLGPKGRNVVLEKAFGSPLITNDGVTIAKEIELEDHFENMGAKLVSEVASKTNDIAGDGTTTATVLTQAIVREGLKNVTAGANPIGIRRGIEAAVAAAVEELKVIAQPVANKEAIAQVAAVSSRSEKVGEYISEAMERVGNDGVITIEESRGMETELEVVEGMQFDRGYLSQYMVTDNEKMVADLENPYILVTDKKISNIQDILPLLEEVLKTSRPLLIIADDVAGEALPTLVLNKIRGTFNVVAVKAPGFGDRRKAMLEDIAVLTGATVITEDLGLELKDATMESLGQASKVTVDKDSTVIVEGAGSAEAIANRVNLIKSQLETTTSEFDREKLQERLAKLSGGVAVIKVGAATETALKEMKLRIEDALNATRAAVEEGIVAGGGTALVNVIAKVAELDLEGDDATGRNIVLRALEEPVRQIAYNAGYEGSVIIDKLKNSPVGTGFNAANGEWVDMVESGIIDPVKVTRSALQNAASVASLILTTEAVVADKPEQKAPAAPATDPGMMGY

SEQ ID NO: 8815 - protein, 492 aa, Soldanella alpina
MDPYKYRSSSAFNTPFWTTNSGAPVWNNNSSLTVGTRGPILLEDYHLVEKLANFDRERIPERVVHARGASAKGFFEVTHDISHLTCADFLRAPGVQTPVIVRFSTVIHERGSPETLRDPRGFAVKFYTREGNFDLVGNNFPVFFVRDGMKFPDMVHALKPNPKSHIQENWRILDFFSHHPESLHMFTFLFDDLGVPQDYRHMEGSGVNTYTLINKAGKAQYVKFHWKPTCGVKCLLEDEAIKVGGANHSHATKDLYDSISAGNYPEWKLFIQIIEPDHEDKFDFDPLDVTKTWPEDIIPLMPVGRLVLNKNIDNFFAENEQLAFCPALIVPGVYYSDDKLLQTRIFSYADTQRHRLGPNYLQLPPNAPKCAHHNNHHEGLMNFMHRDEEVNYFPSRFDPVRHAERHPIPPPVLTGKRDRCMIEKENNFKQPGERYRTFAPDRQERFVCRWVDALSDPRVTHEIRSIWISYWTQADKSLGQKLASRLNVRPTM

SEQ ID NO: 8816 - protein, 594 aa, Salmonella enterica subsp. enterica serovar Paratyphi A str.
MSSKIFCKSWGAEYIAADVVRFRLWATGQQKVMLRLAGKDQEMQVSGDGWFTLDVSGVTPGTEYNFVLSDGMVVPDPASRAQKTDVNGPSYVVDPGSYAWRNTGWKGSRWEQAVVYEMHTGTFTPEGTFRAAIAKLPYLAELGVTVIEVMPVAQFGGERGWGYDGVLLYAPHSAYGTPDDFKAFIDAAHGYGLSVVLDIVLNHFGPEGNYLPLLAPAFFHKERMTPWGNGIAYDVDAVRRYIIEAPLYWLTEYHLDGLRFDAIDQIEDSSARHVLVEIAQRIREDITDRPIHLTTEDSRNIISLHPRDQDGNAPLFTAEWNDDFHNAVHVFATGETQAYYNDFADAPEKHLARALAEGFAYQGEISPQTGEPRGVKSTGQPPVAFVDFIQNHDQVGNRAQGDRLITLAGAERTKVLLATLLLSPHIPLLFMGEEYGESRPFLFFTDFHGDLARAVREGRAKEFADHAGENVPDPNAPETFQRSKLNWKQQHSEEGKAWLAFTRELLLLRQKHIVPLLSAARESSGTVLQTAPGFIAVSWRFPGGTLSLALNISATTVLLPDLPGKTLFAWPNESTGSLSQHSLIVRLAQGESAS

SEQ ID NO: 8817 - protein, 606 aa, Wolinella succinogenes
MCGILGYLRKGSAGQSQLSCEQFNQILSKIAHRGPDHQDFVWFNEPEYQLYLGHVRLSIIDLDERASQPMLFKDRYLLVFNGEIYNYRELKEKLLLQGYGFATQSDSEVLLAAYDFWGETCVEHFNGMWAFAIYDKKRHSLFCSRDRFGVKPFYFYENEEIFVFASEIKALLPFFKEAKLNPKVILPYLARGFLDGGSETFFDGVYRLEASSNLFYDLRGKQKSFQTYYSILLNPLSAKEREIPSSAKELLSLLRQSVSLRLRSDVRVGACLSGGLDSSGVAALASQQYDFGEKLVAIHAKSSLKESDESSYAIEVANHLGLDLHMVEPSFEDFCESLDDLFYTQEEPFGSTSMFMQYFVMKKAKELGCKVMLDGQGADEVFLGYEHYFHNIFKDLRDRKFFLENDFFKDLKTFRYTKEQILEELKKADDAGVAWDVIKNRGNICSRYLCREWLDSYIAPVKTIQEFQKREIFYNHLPSLLRYEDRDSMRFGIETRLPYLDYRIVEWVLALPTEVKFQQGYLKFALREALEISGLLPKSIVWRYNKMGFESPQKLWIDRYRFEMMKVIEGSEIIRDIFFKVDIRRDDFLWKLFSIAKWEKMFNVKL

SEQ ID NO: 8818 - protein, 396 aa, Rhodopirellula baltica SH 1
MCHPREAFVYRDAFGGLRESFFLSTFDTICCGMIGETAGADRVNSLCRELIPGFMMTTEAATIPVRPSQANLEADVLSPIQPDTPTSSYPDAGASSYSDPTKRSIRWDYTIFFVSLHLLTLLVLLPYFFSWAGVAAFVVGVIVFGQMAIPIGYHRMLSHRSFRSPKWFERTLVTLAMCTAQETPAHWVAWHRMHHSHSDHAEDPHSPRISFMWAHVRWLVHESRTRMATFSMYEKYARDILSDPYYRWIEKLPSPAGMFYLAHAFVYALLAVGISGLVYGNNADAYQMAASVFVWGVIARTVWVWHITWSVNSITHVFGYRNYQTTDDSRNNWFVSLLTAGEGWHNNHHADPASASVQHRWWEIDPNYYVIRLFGVLGLATHIIRPRHVRKSGAES

SEQ ID NO: 8819 - protein, 275 aa, Arabidopsis thaliana
IKSFHLQLSYGCEKTTEGAAIKQFLHCNSQATFKLKLERQEILRIFNLMALEALTSPRLASPIPPLFEDSSVFHGVEHWTKGKRSKRSRSDFHHQNLTEEEYLAFCLMLLARDNRQPPPPPAVEKLSYKCSVCDKTFSSYQALGGHKASHRKNLSQTLSGGGDDHSTSSATTTSAVTTGSGKSHVCTICNKSFPSGQALGGHKRCHYEGNNNINTSSVSNSEGAGSTSHVSSSHRGFDLNIPPIPEFSMVNGDDEVMSPMPAKKPRFDFPVKLQL

SEQ ID NO: 8820 - protein, 173 aa, Pseudomonas syringae pv. syringae B728a
MSLHELNTLPGVTANPEAATRQFVFNHTMLRVKDITKSLDFYTRVLGFSLVEKRDFPEAEFSLYFLALVDKAQIPEDDAARNEWMKSIAGILELTHNHGTESDDTASYHNGNSDPRGFGHICVSVPDVKVACERFESLGVDFQKRLSDGRMNSLAFIKDPDGYWVEIIQPTPL

SEQ ID NO: 8821 - protein, 374 aa, Euonymus europaeus
ALSIAGAVQSQKLAVRAISQLQSLPGGDIKLLCDTVVESVRDLTGYDRVMVYKFHDDEHGEVVAESKRPDLEPYFGLHYPATDIPQASRFLFKQNRVRMIVDCHASPVCVIQDYRLIQPLCLVGSTLRAPQGGHAQYMENMGSKASLAMPVIINGNDEEVIGGRNATRLWGLVVCHHTSARCTPFPLRYACEFLLQAFGLQLNMELQLAAQLSEKHVLKTQTLLCDMLLRDSPTGIVTKSPSIMDLVKCDGAALYYQGKYYPLGVTPAQAQMKDIVEWLLAFHGDSTGLSTDSLADAGYPGAALLGDAVCGMAVAYITKRDFLFWFRSHTAKEIKWGGAKHHPEDKDDGQRMHPRSSFKAFLEVVKSKSLPWEN

SEQ ID NO: 8822 - protein, 278 aa, Shewanella sp. MR-7
WASDHRVHHKHVDDNDKDPYSAKMGFWYSHIGWMLREYQAQRYHDYQNVRDLQNDRIVMWQHKHYLALVILMNIGLPALLGWFTGNIAGMLLMAGLLRLVVVHHCTFFINSLAHVWGNQPYTDKNTARDNGFLAMLTYGEGYHNFHHIFENDYRNGIKWWHYDPTKWLIKALSWVGLATDLRTSPQERIESARLQMQLLHAKNKVIHLPNADEIIEKIQQEYELMKEHLLEYYQAKKALLEAKRKQLVDQQLLLQVEELKTRFLTQQKSWKSLTASYS

SEQ ID NO: 8823 - protein, 593 aa, Frankia sp. EAN1pec
MCGLSGELRFDGREADVAAVGRMTAAMEARGPDGVGLWATGPVAFGHRRLKIIDLSERGAQPMVDTALGLTAVFNGCIYNYQELRDRLVDAGYRFFSTSDTEVILKAYHHWGPRCVDHFAGMFAFAVYERDTGRLVLVRDRLGIKPLYVTRDPHRLRFASTLPALLAGGGVSSDIDLVAFHHYLSFHSVVPPPHTILTGVRKLPQATIRTVEADGTTRDEVYWRPDSTRQEEHASWTADDWRDAIGERLRTAVRRRMVADVPVGVLLSGGLDSSLIVALLAEAGQRDLATFSVGFEAAGGESGDEFHYSDIIARRFGTDHHQIRVPGDRLLPAIDAAVAAMSEPMVSHDCVAFYLLSQEVARHVKVVQSGQGADEVFAGYSWYPPLATVPRGDAVDAYLRVFADRPHAELPAMVESHHLIEGDASRHFVAERFAEPGAETSVDAALRIDSTVMLVDDPVKRVDNMTMAAGLEARTPFLDHELVELAAACPPELKLASGGKGVLKDLSRPLMPVDVIDRPKGYFPVPAIRHLGGPFLARVADALTDPVARGRGLFRKDWVDEMLADPNSNRTTLGANALWQAALLEMWLQTQGV

SEQ ID NO: 8824 - protein, 374 aa, Euonymus europaeus
ALSIAGAVQSQKLAVRAISRLQSLPGGDIKLLCDTVVESVRDLTGYDRVMVYKFHDDEHGEVVAESKRHDLEPYFGLHYPATDIPQASGFLFKQNRVRMIVDCHASPVRVIQDDRLIQPLCLVGSTLRAPHGCHAQYMENMGSKASLAMAVIINGNDEEVIGGRNATRLWGLVVCHHTSARCTPFPLRYACEFLLQAFGLQLNMELQLAAQLSEKHVLKTQTLLCDMLLRDSPTGIVTKSPSIMDLVKCDGAALYYQGKYYPLGVTPAEAQIKDIVEWLLAFHGDSTGLSTDSLADAGYPGAASLGDSVCGMAVAYITNRDFLFWFRSHTTEEIKWGGAKHHPEDKDDGQRMHPRSSFQAFLEVVKSRSFPWEN

SEQ ID NO: 8825 - protein, 475 aa, Gibberella zeae PH-1
MATATAAGKNASPFPDGTKDYVPLRAGAAKKDTNKPHISDTPMTWSNWPQHINWLNTTLVVFVPLMGFISAYWVPLQLKTALWAVFYYVHTGLGITAGYHRMWSHSAYKGTTPLKIYLAAVGAGAVQGSIRWWSYGHRVHHRYTDTDKDPYSVRKGLMYSHMGWMVLKQNPKRQGRTDITDLNEDAVVVWQHKNYIKCVLFMALAFPAIVAGLGWGDWWGGLVYAGILRVCFVQQATFCVNSLAHWLGDQPFDDRNSPRDHVITALVTLGEGYHNFHHEFPSDYRNAIEWWQYDPTKWSIWLWKQLGLAYELKEFRANEIEKGRVQQLQKKLDQKRATLDWGIPLEQLPVVDWDDFVAQSKAGKGLVAIAGVIHDVTDFIKDHPGGKALINSAIGKDATAIFNGGVYLHSNAAHNLLSTMRVGVLRGGCEVEIWKRAQFENKDITYMNDSAGQRIIRAGSQATKIVQPAASADAA

SEQ ID NO: 8826 - protein, 374 aa, Gyminda tonduzii
ALSIAGAVQSQKLAIRAISQLQSLPGGDIKLLCDTVVESVRELTGYDRVMVYKFHEDEHGEVAAESKRTDLEPYFGLHYPATDIPQASRFLFRQNRVRMIVDCHASPVRVIQDDGLMQPLCLVGSTLRAPHGCHAQYMENMGSKASLAMAVIINGNDEEVIGGRNATRLWGLVVCHHTSARCIPFPLRYACEFPMQAFGLQLNMELQLAAQLSEKHVLKTQALLCDMLLRDSPTGIVTQSPSIMDLVKCDGAALYYQGKYFPIGVTPTEAQIKDIVEWLLVFHGDSTGLSTDSLADAGYPGAALLGDAVCGMAVAYITKKDFLFWFRSHTTKEIKWGGAKHHPEDKDDGQRMHPRSSFKAFLEVVKSRSLPWES

SEQ ID NO: 8827 - protein, 403 aa, Clostridium acetobutylicum ATCC 824
MDNKKKKWIVITVAIVVVTNIASLFLGGRFLVFAGNSRVAVDKDTYDTVQKFSKLFSVRDQLYKYYDGKISDSVLLDGALKGMTSSLKDPYTVYMDKSETKSFNSEIQGQQYVGLGMEVQAKDNKVIVSTVFDNSPAEKAGMKSGDVIVKVNGTDAVSTDLEKTVSMIKGKEGTSVTLTLYRSTKGNFDITAKRQKVAIDTVSGEMLSNEIGYMQVSMFDENTGNNFNKKIDELKQQGMKGLILDLRSNPGGLLSACIQVTSNFVTKDKVIVSTIDKYNSKEEYKSKGGNYIGLPLVVLVDGNTASASEIFSGAIRDYKLGTLIGEKTFGKGVVQAPFDLNDGTQLKITISKYYTPNGENIHHKGIKPDIEVKYPDTLKDKPYDRNSDPQFQKALEQIKSKMK

SEQ ID NO: 8828 - protein, 449 aa, Idiomarina loihiensis L2TR
MNTKQQLVFIMADYRLGLFVFRNDLRVEDNLALYEAAQRSETLICCFCFNPTQNKYGHYGIPAMGKHRFTFLQQSLKQLRTELEMRGQKLIVLTGTFDRILTELISERQVDAIFLSQHQGYYERLQLGLLQQRFPFLPFHETPNNTLFSEQELPFELADLPETFSQFRKKVEPLSRNFSVQPVNALPSLPKNISYPGFKAETLNELASDDFEGGERAALTHLTSYFSGESAGTYKQTRNALDDFSSSTKFSPWLAQGCLSVRQIMAALRAYETEFGENESSYWISFELLWREYFFWYALKHGKRLFAFSGLSGKSPKTSFYSERFQKWCSGNTPYPIVNACMKQLNATGYMSNRGRQLVASCFVHELSLDWRYGAAYFEQQLIDYDVSSNWGNWQYLAGVGADPRGHRQFNLEKQTERYDPDNEFIERWAGDLSGQPIDSVDAADWPVR

SEQ ID NO: 8829 - protein, 245 aa, Gymnosporia mossambicensis
ALSIAGAVQSQKPAVRAISQLQSLPGGDIKLLCDTVVESVRNLTGYDRVMVYKFHEDEHGEVVAESKRSDLEPYIGLHYPASDIPQASRFLFKQNRVRMIVDCHASPVRVIQDDGLMQPLCLVGSTLRAPHGCHAQYMENMGSLASLAMAVIINGNEEEAIGGRSPTRLWGLVVCHHTSARCIPFPLRYACEFLMQAFGLQLNMELQLAAQLLEKHVLKTQTLLCDMLLRDSPTGIVTQSPSIMD

SEQ ID NO: 8830 - protein, 798 aa, Aspergillus nidulans FGSC A4
MSSQGITRKRPAPGTSPAVHPQLGQLPNYPPTSGSPLSNDQFLQWGQNPSPNTVAPGSFPDANTYNTGALPASAHDISGVSTANNQVARRTPSTQIVNRSRSYEQPPAPLSDPSNVPSEPGGWSESLEELYKRALAAKREAQAKRKQIPPFVQKLSSFLDESKNTDLIRWSDDGNSFIVLDEDEFAKTLIPELFKHNNYASFVRQLNMYGFHKKVGLSDNSMRASERKNKSPSEYANPYFKRGHPDLLWLIQKPKNTAGQGTKSGKGYVRVKTEDAENENEDFGDENAGASRDDGARNRQLSLVAQQPSLPKDQFATVYRELQAIRQQQQIISSTINKLRREHEQLYAQAANFQEQHTRHENSINAILTFLATVYNRSLQGQEGQNLANSFAGAISQDQGNVVDMGDGYSFGPLGAPSMNSPGGPRSMKKQPLLLKAPPGSERHGRAATLSPAATAYDRSQSRNNSRQTSTSQSGQVEEVFDNNSPRSKETSSSQAQQYPQRDIMSVIQNANARNGIPTSYSDFPNVLSSLETSNGNVPLTSNQRADMLRLMANESGTNDSGVTVSQNNALISPVPPPMPNNYSARLADTRSEIDNLMKMQAEQDRSVQNLTNLLQPLSPSGTIPGIGSDGTIPPPPLELDQIFNNDYFTDFGDYDQQNRANVDLGDSTGAGQAPPSTEPPAPPDDIAIKHDGNDLFDFDHLAGEGELFAGTNNQSSPGYFPQFDSGYGHSAANTTGASTGVSGSGRVVETLTDSESTSPSNTVDDPTHYSADVFDAGDGSQGGKSSSGGGSKRRRKA

SEQ ID NO: 8831 - protein, 189 aa, Polaromonas sp. JS666
MLQRVRSSPNMTPLRGKAARWPPPASRPGVMAARAILSSMRPWRKSTRRGYMHNRLRMVTASFLVKDLGIDWRWGERYFAEKLNDFDLSANNGGWQWAASTGCDAQPYFRIFNPVSQSEKFDAEGKFIRKYLPPLEKLPASCLHSPWLAKPVELSAAGVSLGQNYPMPIVQHDEARALTLQRYAVVKKS

SEQ ID NO: 8832 - protein, 207 aa, Dahlstedtia pinnata
VMAYKFHEDDHGEVIAEITKPGLEPYLGLHYPATDIPQAARFLFMKNKVRMIVDCHAKHVKVLQDEKTPFDLTLCGSTLRAPHSCHLQYMANMDSIASLVMAVVVNDNEEDGDSSDAVQPQKRKRLWGLVVCHNTTPRFVPFPLRYACEFLAQVFAIHVNKEIELEYQIIEKNILRTQTLLCDMLMRDAPLGIVSQSPNIMDLVKCD

SEQ ID NO: 8833 - protein, 245 aa, Gymnosporia mossambicensis
ALSIAGAVQSQKLAVRAISQLQSLPGGDIKLLCDTVVESIRNLTGYDRVMVYKFHEDEHGEVVAESKRSDLEPYIGLHYPASDIPQASRFLFKQNRVRMIVDCHASPVRVIQDDGLMQPLCLVGSTLRAPHGCHAQYMENMGSLASLAMAVIINGNEEEAIGGRSPTRLWGLVVCHHTSARCIPFPLRYACEFLMQAFGLQLNMELQLAAQLLEKHVLKTQTLLCDMLLRDSPTGIVTQSPSIMD

SEQ ID NO: 8834 - protein, 423 aa, Debaryomyces hansenii CBS767
MSGVQVAALKDTDLFKSLKVGEHTLSNKVVYPPTTRMRALSDHTPSDLELEYYEERSKYSGSLLIAEATFVSEQAGLNGTVPSTWNSEAAGYVPGIWNDKHAQAWKKITDRVHENGSFMSSQFWFLGRVGDPQLLKDRGLDYVAPSAIYPDEDFKKKALAAGNPIRALTEDEIHDLIYKTYPNAARKAIAAGFDYIELHAAHGYLLDQFLQPTSNQRTDKYGGSIENRARVVLELVDHLTTVVGAKKLAIRISPWATFQGMKADQDSTHAVTTFSYLLHELQKRADDGNELAYVSIVEPRVQGGDDVEKSQQVGDNTFVGQIWKGIILKSGNYTYDAPDFKTLLHDISDNRTMVGFSRYYTSNPDLVKRLYEGWDLTPYDRLTFYGSSNWGYNTFDNYNRKRQFTKDIESGKLPKAIEEIEVK

SEQ ID NO: 8835 - protein, 512 aa, Shewanella oneidensis MR-1
MSVNQNRSGKHALMWFRQDLRLTDNQAFTAACDWVRQHHAAKLKAIYIATPSQWHQHDIAPIQLDFIQRHVNLLAQGLVSLGVEFELIQLDSFRDIPAFLTSYCEEHSIGRVFAGQEPEINEQKRDQACVEAGIPLSLSDEHCLLPPGTVLNLSGDMYRVFTPFSRKWREVAAKQAILPLGVPAPLGSILSEPKPLFFKNIGSTYLAASKDIASSKKGFNQTAPNPLISSEQWAAGEGQAKRLLNQFIQQKVQDYKQDRDFPAIDGTSVISPYLAIGVLSPRQCVAALLQRFPEVIVDDTSPGRTWLNELIWREFYRHLLVAFPDLSKGNNFNRQADHVLWRNNQSEFLAWCEGKTGYPIVDAAMRQLNQTGWMHNRLRMVVASFLTKHLLIDWRWGERYFRQHLIDGDLAANNGGWQWSAGCGCDAQPYFRIFNPMSQSEKFDPDGRFIRKYLPELASWGVTRLHQPNQQKMPSLFEAPLFASQADYPNAIVEHNAARARALTVLGVLKKA

SEQ ID NO: 8836 - protein, 418 aa, Mesorhizobium sp. BNC1
MRNTSQASIDPATPLLFSPLSLRSVHLKNRIVVAPMCQYRSVAGGPTDWHLVHLGKFAVGGAGIVFTEETAVEERGRKTYACAGLYNDDHVKSYRRITDFIRSQGAVPAVQLGHAGRQASCHGAELGWKPLTEEDARAGLPPWQGVAPSPFAWCPDASVPHELSHADIKDMLAIWKESTLRAVDSGFDICEIHGGHGYLLHQFLSPLANKRTDAYGGDRSGRMRFVLEVTEAVRSAWPADKPLFFRMSVVDGRGGQWFVEDSIALAAELREIGVDLIDCSSGGMNGDGVFPPVPRVPEFQVEYSKALRHGARMPTLAVGLITSPRRAEAILQAGEADLIAIARGAIWDPNWPAHAAAELGKHEPYAVLPGDMAFRLRDRDSHRDSYPYGTKVDIPLSPDRSIPYSWPERGEYWPPVRE

SEQ ID NO: 8837 - protein, 408 aa, Pseudomonas fluorescens Pf-5
MPGLFFSLSRALSPMWYEGLLGLSAWQLVAVTLLMTHVTIVAVTVYLHRYSAHRSLELNAGLKHFFRFWLWLTTAQNTREWTAIHRKHHAKCETADDPHSPVVKGLSTVLRKGAELYREEAKNPETLRIYGKNCPEDWIERNLYSRYKLGGVALMAAIDLLLFGTIGITIWAIQMMWIPFWAAGVINGLGHAVGYRNFECRDAATNLVPWGIIVGGEELHNNHHTYPNSAKLSVKKWEFDLGWAWIKVFSFLRLARVQRVAPIAHRVEGKGHLDMDTAMAILNNRFQIMAQYRKLVIGPLVKQELAKVDHSVRHQFHRAKRLLSRETSLLEDRHHLRIQSMLEHSQALKVIYEKRLALQQIWVKTSSNGHDMLAAIKDWVHEAEASGIQSLRDFAHQLKTYSLRPTTA

SEQ ID NO: 8838 - protein, 446 aa, Striga hermonthica
MGRMMMIEQEGRGQSVSLSRIAVSDTHGEDSPYFAGWKAYDEDPYDESLNPFGVIQMGLAENQVSFDLVEQYLEKHSDATNIGANSGFRENALFQDYHGLLSFRQAMASFMERIRGGRANFDPERIVITAGATAASELLTFILADPGDAVPVPTPYYPGFDRDLRWRTGVNIIPVHCHSANNFAITPEALDSALKHARASNTNVRALLITNPSNPLGATLSRATLDLALDFVSRHDLHLVSDEIYSGSAFSPDEFVSVSQVLESRGYKDAERVHVVYSLSKDLGLPGFRVGTIYSYNDRVVQTARRMSSFTLISSQTQKLLASMLSDKEFTEKYVRINRERLRGRYEATVEGLKRAGIRCLGGNAGLFCWMDLSGELREGSREDELELWGKLLREVKVNVSPGSSCHCSEAGWFRVCFANMSERTLEVALGRIQAFMERRRRRIAN

SEQ ID NO: 8839 - protein, 546 aa, Neorickettsia sp. SF agent
MANEVISGEQLQKVIRDAADLVVSSAGVTLGPEGRPVIMSKSYGGPEVTKDGYKVINQLKPEDDKVAKIVELLNQATSQANEKAGDGTTTATILVGNMIKNAHKHIAAQRSRMKLKSGMKRARDEVVKYIQSVARKINSEEEIAQVGSISANGNSEIGNKIAEAMSKVGKEGVITVEEGKGLDEFSVSVVQGMVFDRGYVSPYFITNPEKMIVEFDNPYILLANKKLSSIQPMVPLLETIVRSNRAVVIIAEDVEGEALTSLVLSKMRGSLKACAVKAPGFGDRRSEMLEDIRILTGAKTLVSDDLGVTVESLTVEDLGTAKSIIISKDSTTIVDGGGEKAAIEARVKQIKTQIDKTTSDYDKEKLQERLAKLAGGVAVLKVGGATEVEVKERKDRVEDALHATRAAVEEGIVPGGGATLLSAIAVLEKLSSDDDDEQAGINIVKAALKAPISQIVENAGEDASVIIYNLLESKDPNRIFDARELKYVDAFKAGIIDPAKVVRVALESAVSVASVLVTTEALIVDLPSKDNGSSSMMPGGGMGGMG

SEQ ID NO: 8840 - protein, 494 aa, Zea mays
  misc_feature (211)..(211): Xaa can be any naturally occurring amino acid
MVLSHGVGGSDESVHSTFASRYVRTSLPRYRMPEQSIPKEAAYQIINDELMLDGNPRLNLASFVTTWMEPECDKLIQASVNKNYVDMDEYPVTTELQNRCVNMIAHLFNAPLGDAETAVGVGTVGSSEAIMLAGLAFKRRWQNKMKAAGKPCDKPNIVTGANVQVCWEKFARYFEVELKEVKLSDGYYVMDPQKAVDMVDENTICVAAILXGSTLNGEFEDVKLLNDLLTKKNAETGWDTPIHVDAASGGFIAPFLYPELEWDFRLPLVKSINVSGHKYGLVYAGIGWCIWRTKADLPEELIFHINYLGADQPTFTLNFSKGSSQVIAQYYQLIRLGFEGYKNIMENCQENATVLKQGLEKTGKFNIVSKDNGVPLVAFSLKDNSRHNEFEISDFLRRFGWIVPAYTMPPDAQHVTVLRVVIREDFSRTLAERLVLDIEKVLHELDALPARVPSGDLAALAAAESSEREMEKKRQVISLWKRAVLAKKKTNGVC

SEQ ID NO: 8841 - protein, 424 aa, Striga hermonthica
LSTDMIEEWIDKNPKASITTREGVHAFRNIALYQDYHGLPEFRNGVAKFMSKARGGRVSFDPDRIVMGGGATGASELLMFCLADSGDGFLVPSPYYPGFDRDLRWRTGVQLLPVMCQSSNNFKITKEALEEAFDQAQKANIKVKGLMIANPSNPLGTTLDRPTLKSLVTFINERQIHLVCDEIYAATAFRAPEFISISEVIEEVECNRDLIHIVYSLSKDMGLPGFRVGIMYSYNDVVVDRGRKMSSFGLVSSQTQHLLATMLSDEEFTDKFMLENTRRLANRHEMFTKGLEEVGITCLESNAGLFCWMDLRHLLKEPTFEGEMGLWRVIITEVKLNVSPGMPFHCHEPGWFRVCFANMDDETLKVALTRIRVFVAKGSEVDAKVKKPWQMNLRLSFSSRIYDETMASSPRVMSPHSPLVRAWT

SEQ ID NO: 8842 - protein, 485 aa, Lycopersicon esculentum
MGFEIAKTNSILSKLATNEEHGENSPYFDGWKAYDSDPFHPLKNPNGVIQMGLAENQLCLDLIEDWIKRNPKGSICSEGIKSFKAIANFQDYHGLPEFRKAIAKFMEKTRGGRVRFDPERVVMAGGATGANETIIFCLADPGDAFLVPSPYYPAFNRDLRWRTGVQLIPIHCESSNNFKITSKAVKEAYENAQKSNIKVKGLILTNPSNPLGTTLDKDTLKSVLSFTNQHNIHLVCDEIYAATVFDTPQFVSIAEILDEQEMTYCNKDLVHIVYSLSKDMGLPGFRVGIIYSFNDDVVNCARKMSSFGLVSTQTQYFLAAMLSDEKFVDNFLRESAMRLGKRHKHFTNGLEVVGIKCLKNNAGLFCWMDLRPLLRESTFDSEMSLWRVIINDVKLNVSPGSSFECQEPGWFRVCFANMDDGTVDIALARIRRFVGVEKSGDKSSSMEQKQQWKKNNLRLSFSKRMYDESVLSPLSSPIPPSPLVR

SEQ ID NO: 8843 - protein, 633 aa, Lactobacillus plantarum WCFS1
MCGLVGCLTDRRKVDNAAYDQVVREMTKMIVHRGPDDEGYFADDNITMGFRRLSIIDLAGGHQPLSYDNERYWLTFNGEIYNYVELREQLIQEGYTFKTDSDSEVILGMYAKYQAKLTTYLRGMFAFVIWDKQEKTLFAARDQFGIKPFYYAIAGDDFYYASESKAIYKILKDKHFDQEALQDYLTFQYVPETETLTKEIKMLAPGCSLTKQLGHAPQIKRYYHWEFHPVVRSEQDYATRLKETLIDSVKIHMRSDVPVGTFLSGGIDSSIVVAIAKQFNPNLKTISVGFERPGYSELDVAQETAAKLNVDNVQMTITPEAFMAAFPHFVWSMDDPLADPAAVPQYFLTKEAVKHVKVCLTGEGADELFGGYTIYHEPESLKAFRYTKPINGALQRIAAMMPAGMRGRSLLMRGTTPLEKRYVGNAFIFNETEKQQFMKHYNRDHSFQQTTRVFYDEAKHYDLISKMQFIDMHTWLNGDLLHNADRTALAHSLELRTPFVDREVFNLAAEIPANLRISHGTTKYILRKAVEDIVPAHVLYRKKLGFPVPIRLWLKDEMYDWAKNIIVTSQTDQYFDKTYFLKLLDDHRAGIRDNSRQLWTVLTFMMWHKLYVEADMLMDSVTANHLAEQVEIG

SEQ ID NO: 8844 - protein, 463 aa, Arabidopsis thaliana
MAEEGFIGIGESEEEAAEIGAFSYSHHQISDLRRRSSAVKDDSAQTSTPSSPPPPLPIHAGGSAVGATGKAKKKTGGARLWMRFDRTGAMEVVECDKSTIIKRASVPARDLRILGPVFSHSSNILGKNFDLLIPGLAREKAIVVNLEVIKAIVTAEEVLLLDPLRPEVLPFVERLKQQFPQRNGNENALQASANVQSPLDPEAAEGLQSELPFEFQVLEIALEVVCSFVDKSVAALETEAWPVLDELTKNVSTENLEYVRSLKSNLTRLLARVQKVRDELEHLLDDNEDMADLYLTRKWIQNQQTEAILAGTASNSIALPAHNTSNLHRLTSNRSASMVTSNTEEDDVEDLEMLLEAYFMQLDGMRNKILTVREYIDDTEDYVNIQLDNQRNELIQLQLTLTIASFAIAAETLLASLFGMNIPCPLYSIHGVFGYFVWSVTALCIVLFMVTLGYARWKKLLGS

SEQ ID NO: 8845 - protein, 165 aa, Magnaporthe grisea 70-15
MSDSPQSNPKEIEGAHTPDEEAQMNDPQDPQSAGLGYEFEVKEQDRWLPIANASEKCHQEKRKTVNGEDILFAMTSLGFENYSEALKIYLAKYREQNQSTRGEGQQNRPSSQGYGAPPGAAPGTNATAGFPGGELGQQGTEAPGDASGYLYSTQPGHNGATAGEY

SEQ ID NO: 8846 - protein, 637 aa, Oceanobacillus iheyensis HTE831
MYHISAEDIYLFHQGTNFESHQFLGCHEINWKGKRGYRFAVWAPNALKVCVVGDFNNWEENSHPLEKFTDEGLWGGFIADIPPATSYKYHICSSEDTSILKADPFATQAERRPKTASVIPAANGYQWSDDQWIEQRNTYDPYSSPISIYEVHLGTWKKTLKKQFLSYRELATQLIPYVKSLGYTHIELLPINEHPFDRSWGYQITGYFAVTSRYGNPSDFKYFIDQCHQHQIGVILDWVPGHFCKDDFGLRQFDGAPLYEYRDPKKSEKKSWGTLAFDYGRPEVQSFLISNAIYWLKEFHIDGLRVDAVASMLYLNFDRYDEEEKIYNTYGGEENLEAFAFLRKLNKVVFSYIPGALMMAEDSSDLPLVTAPVNKGGLGFNYKWNMGWMNDLLSFMEKESIHRKWHHNRLTFSFMYTYSENYLLPLSHDEVVHGKKSLLDKMPGDQWQQFANLRLLYGYMYTHPGKKLVFMGGELAQYAEWKDTEELDWHLLEYPLHKGIYHYIKNLNELYQQHPELYELDHLSEGFEWIDPHNIDQSVIAFRRKANKPNQELIIICNFTPQVHFDYKIGVPESGRYKEIFNSDSVRFGGSGQINEGEHFSFPEKWHGLSQHIKIKVPPLAISVFQIEVERERLPRE

SEQ ID NO: 8847 - protein, 172 aa, Oryza sativa
GFLEGGAGMADAGHDESGSPPRSGGVREQDRFLPIANISRIMKKAVPANGKIAKDAKETLQECVSEFISFVTSEASDKCQKEKRKTINGEDLLFAMGTLGFEEYVDPLKIYLHKYREMEGDSKLSSKAGDGSVKKDTIGPHSGASSSSAQGMVGAYTQGMGYMQPQYHNGDT

SEQ ID NO: 8848 - protein, 519 aa, Lycopersicon esculentum
QGELFLKTRAEELDKEMGLIIRQEETGRHVRMLTHEIRSTLDRHTTLKTTLVELGRTLDLAECALWMPCQGGLTLQLSHNLNNLIPLGSTVPINLPIINEIFSSPEAIQIPHTNPLARMRNTVGRYIPPEVVAVRVPLLHLSNFTNDWAELSTRSYAVMVLVLPMNGLRKWREHELELVQVVADQVAVALSHAAILEDSMRAHDQLMEQNIALDVARQEAEMAIRARNDFLAVMNHEMRTPMHAVIALCSLLLETDLTPEQRVMIETILKSSNLLATLINDVLDLSRLEDGILELENGTFNLHGILREAVNLIKPIASLKKLSITLALALDLPILAVGDAKRLIQTLLNVAGNAVKFTKEGHISIEASVAKPEYARDCHPPEMFPMPSDGQFYLRVQVRDTGCGISPQDIPLVFTKFAESRPTSNRSTGGEGLGLAICRRFIQLMKGNIWIESEGPGKGTTVTFVVKLGICHHPNALPLLPMPPRGRLNKGSDDLFRYRQFRGDDGGMSVNAQRYQRSL

SEQ ID NO: 8849 - protein, 200 aa, Xeroderris stuhlmannii
HEDDHGEVIAEVKKPGLEPYLGLHYPATDIPQATRFLFMKNKVRMIVDCRAKHVNVLQDKKVPFDLTLCGSTLRAPHSCHLQYMENMNCSASLVMAVVVNDNDEDGDSDAVQPQKRKRLWGLVVCHNTTPRFVPFPLRYACEFLAQVFAIHVNKELELEYQIVEKNILRTQTLLCDMLMRDAPLGIVTQRPNIMDLVKCD

SEQ ID NO: 8850 - protein, 370 aa, Corynebacterium glutamicum ATCC 13032
MDFWTILDTMTSLLTPIAIRGLEIPNRMWLAPMCQYQANNLDGVPLDWHLVHYGARAVGGFGLLIAESTGISPEGRISSRCTGLWNEAQVEAWERITNFVHAQGGLIGVQLNHAGRKASTYPALPNFPTGTQSVDEGGWETFGPSAVAQPGLADPTELTREGIEKVIQDFAAAAERAVRAGFDAVEVHGAHGYLLHQFLTPVANKRTDIYGGSFENRTRLFREVAQAIRAVIPGSMPLIARISATDWIDDEPSWDDDQTVSLVSDLKKLGVDAVDISTGGAVPATIPVEPSYQVKFARRVKQEVGIPTSAVGLITHVGQAQGHLDRGDADIISLGRAALRYPSWPLFAAHELGKTRDEIPYPPSYVRGAW

SEQ ID NO: 8851 - protein, 207 aa, Millettia dura
VMAYKFHEDDHGEVIAEITKPGLEPYLGLHYPATDIPQAARFLFMKNKVRMIVDCHAKHVKVLQDEKIPFDLTLCGSTLRAPHSCHLQYMANMDSIASLVMAVVVNDNEEDGDSSDAVQPQKRKRLWGLVVCHNTTPRFVPFPLRYACEFLAQVFAIHVNKEIELEYQIIEKNILRTQTLLCDMLMRDAPLGIVSQSPNIMDLVKCD

SEQ ID NO: 8852 - protein, 438 aa, Zea mays
  misc_feature (128)..(128): Xaa can be any naturally occurring amino acid
VSASKTKIYMVLEYVNGGELFDKIALKGKLTEKEGRKLFQQLIDAVGYCHEKGVCHRDLKPENVLVDAKGNIKVSDFGLSALPQNQRKDGLLHTTCGSPNYIAPEVLLNKGYDGSVSDVWSCGVILYXMLTGSLPFDDQNMVVLYQKILKGNAHIPKWLSQGAQDLLRKILDPNPITRVDVDGIRAHDWFKQGYAPSAPFNDDEEDINVDEEDSLNMTENGIQDKIAINQINAFQLIGMSSCLDLSGFFEKEDASERKIRFASNYPPAYLFEKIESIVRKMGFQVHKSNGKGAESHCHVLQLKVIQDCKGLANLRGKESLLISAEVFEINESLYVVELKKSSGDCSLYRKLCETLSEDLGTCKSQQFLKQDSIRQEIDLLGPWVRSIARIELLPGINHLDALPPKRPPHFCNTFRLCILLWKKLLQCKLQAARVAGRR

SEQ ID NO: 8853 - protein, 183 aa, Capsicum chinense
GAYGIVCSALNSETNENVAIKKVANAFDNKIDAKRTLREIKLLRHMDHENIVAIRDIIPPPQREAFNDVYIAYELMDTDLHQIIRSNQALSEEHCQYFLYQILRGLKYIHSANVLHRDLKPSNLLLNANCDLKICDFGLARVTSETDFMTEYVVTRWYRPPELLLNSSDYTAAIDVWSVGCMF

SEQ ID NO: 8854 - protein, 135 aa, Oryza sativa
DEDLQKIGIGLTGFGVFFSFLGIIFFFDKGLLAMGNILFLSGLGLTIGLKSTLQFFTKPKNYKGTISFGAGLLLVLIGWPFFGMLLEAYGFIILFSGFWPTLVVFLQKIPFIGWIFQQPFVASYLGSYRGKRVPV

SEQ ID NO: 8855 - protein, 180 aa, Capsicum chinense
GAYGIVCSALNSETNEHVAIKKIANAFDNKIDAKRTLREIKLLRHMDHENIVAIRDIIPPPQREAFNDVYIAYELMDTDLHQIIRSNQALSEEHCQYFLYQILRGLKYIHSANVLHRDLKPSNLLLNANCDLKICDLGLARVTSETDSMTEYVVTRWYRPPELLLNSSDYTAAIDVWSVG

SEQ ID NO: 8856 - protein, 215 aa, Mesorhizobium sp. BNC1
MSTLRAGIVPVTPFQQNCTILFDEEEKRGIVVDPGGEVDRIRAAIEQNGLTIEAIWLTHGHIDHAGGAMDLKDALGVEILGPHEAERDLLLNLAAQGRMFGLAEPVRDVTPDRFLNEGDVVSFAGHSFKVFHCPGHSPGHVVFYNDAAKFAHVGDVLFQGSIGRTDLPGGDHAALIRSIKDKLLPLGDDIGFLCGHGPGGRFGGERRTNPFLIGQ

SEQ ID NO: 8857 - protein, 193 aa, Millettia dura
MAYKFHEDDHGEVVSEIRRSDLEPYLGLHYPATDIPQASRFLFKQNRVRMICDCGAKPVKVIQSEELRQPLCLVNSTLRSPHVCHTQYMANMGSTASLVLAIIVNGNDTTRLWGLLVCHHTSPRYVPFPVRYACEFLMQAFGLQLYMEIQLASQKAEKRMLKTQTLLCDMLLRDAPLGIVTQSPNIMDLVKCD

SEQ ID NO: 8858 - protein, 183 aa, Capsicum chinense
GAYGIVCSALNSETNEHVAIKKIANAFDNKIDAKRTLREIKLLRHMDHENIVAIRDIIPPPQREAFNDVYIAYELMDTDLHQIIRSNQGLSEEHCQYFLYQILRGLKYIHSANVLHRDLKPSNLLLNANCDLKICDFGLARVTSETDFMTEYVVTRWYRPPELLLNSSDYTAAIDVWSVGCIF

SEQ ID NO: 8859 - protein, 695 aa, Solibacter usitatus Ellin6076
MERQCISEYNFESTDCAGASAARDNTSRKVPRVVAAILTSVIRSTPAATTSAVCRRDGKFERVPMCGIAGYALIDQSAQRARVQAMCDQIRHRGPDDEGVHVDRNCAIGMRRLSIIDLSTGHQPMCNEDGSVWIVFNGEIYEYKELRAELIAHGHQFRTASDTETLLHLYEEEGVEGLRRLRGMFAFAIWDARRNRLMLARDPFGKKPLYYAVLPTGIYFGSEISCLREAGVPLEPDPEALRLYFQFNYIPDPMSAYRAVRRLPAGSWLTWENGQVRQGRYWQPPVPAAQPVAGLSHADAVVKVREKFDEAVRIRMIADVPLGAFLSGGIDSSSIVASMAMQSREPIKTFSIGFEESEFNELPYAAMVARKYGADHHEIVVRPDSIGIIRKFARHFGEPFADASAIPTYIMSEFAARYVKVALSGDGGDELFGGYTSLRQVQKLAAFDRVPQAVRLMMSWASSRMPYSAYGKNFLHMLGRRSALDRYFAFNYAPFHMRSKLLRPDWMLPAESGFLARALPDCILPEDAGALSQVMYFEGTANLTGDMLVKVDRMSMAASLEVRCPLLDHELAELAATIPHAWKVVGGQGKRILLDALGDRLPPELLNRPKTGFGVPLVDWFRTSLRELLWDTLTAERFLAHNIVAPEFLRTLLEEHDSGRRDNSQWLFTLLVLALWFEDIEQPLASPVPARVEGA

SEQ ID NO: 8860 - protein, 604 aa, Pseudomonas syringae pv. syringae B728a
MPLRTDDNWRHGAVLLDPEHTRFALWAPDTSFVNVELQDGQSLAMLPQSDGWFVLEARCKAGTRYRFRIDHELDVPDPASRAQVDDVHSESLVVDPHAYSWQNTAWNGRPWHEAVIYELHVGAMGGYAGVEKHLPRLARLGVTAIELMPLAQFPGDRNWGYDGVLHYAPQSSYGTPEQLKHLIDTAHGLGLMVILDVVYNHFGPDGNYLGSYAKEFFRSDLHTPWGDAIDFRRPQVRDFFVDNALMWLLEYRFDGLRMDAVHAIRDKTFLPEFAERVRSRIEPGRHVWLNLENEFNQASLLEKGFDAQWDDDGHNTLHVLLTGETDAYYSDFAKEPTQKLARLLSEGFVYQGEPTRHGHTRGEPSAHLPPSAFVLFLQNHDQIGNRALGERLPQLCAPAALKAATALLLLSPMIPLMFMGDEWAASEPFLFFTSHHGELADAVREGRRKEFADFAAFADPEKREHIPDPNDIKTFEASRPAFSAVDLDTDIGQDHRSWLQFYTQLLALRHQEIMPRLQGARFLSTDILGDKAVSARWTLGDGSELRIDLNLSEHAVDAPPQTGAREIFSSAEKSSELSPPGTLNAYTAIVSLKASDVLEEQDEQ

SEQ ID NO: 8861 - protein, 530 aa, Vibrio cholerae O1 biovar eltor str. N16961
MAAKHVLFSTDARQKMLSGVNLLANAVKVTLGPKGRHVVLNKSYGAPTITKDGVSVAKEIELADKFENMGAQMLKQVASKANDEAGDGTTTATVLAQALINEGMKAVAAGMNPMDLKRGIDKAVSAAVEKLHQLAKPCSDTQSITQVGAISANSDHAIGEIIAQAMEKVGRNGVITVEEGQALQNELSVVEGMQFDRGYLSPYFINQPKAGCVELENPYVLLVDKKISHIRELLPILESVAKASRSLLIIAEDVDGDALATLVVNSMRGIIKVAAVKAPGFGEQRKAMLEDIAALTAGRVISEEIGLELEKVTLDDLGSAKKVTINKDNTTIVDGAAEPSALQDRIAQIQHQLEHTTSQYDRDKLQQRIAKLSGGVAVIKIGAATEVEMKEKKDRVDDALHATRAAVEEGIVAGGGVALLKIANELSNLQGDNDDQNVGIRIALRAMEEPLRQIAINAGDEASVIANQVKTGDEHYGYNAATGQFGNMLEMGILDPAKVTRSALQFAASIAGLMITTEAMVSEVDKESAA

SEQ ID NO: 8862 - protein, 1001 aa, Rubrivivax gelatinosus PM1
MSNEHVDSQFERAAAEARAAVDRRVLRPLRDLAVARKLALIVFLLVGVVVGLVYLSKLSSDILSGVRAYVAGDGLWAKGNRDAVFYLVRYAQTHEEADYRQYAAALSVTLGDRQARLELEKPDFDYDVAYAGFLAGRNHPDDIDSLIWLFRTFRNLSYMDRVIQLWTRGDEEMALLRSYGDTIRTQVLNGSLSPAHAALLIGEIEVLNRRLVPIEDAFSTVLGEASRWIAQLLFALMLVTACGLLTLGLVVAGYLTRRINRQIDGLRDGALRMADDDFEQPVEIVSDDELGRLAATFNSMQARLREHRSAIEASAAELQQATAAAQALALQAETASQAKSQFMATMSHEIRTPMNGVLGMTELLLGTALDSRQRRFAQAVYRSGESLLEIINDILDFSKIEAGKLELAPADFTPRALVEDVLELLAPRAQERGLELSFREEPGLPPALHGDALRLRQVLTNLVANAIKFTEHGEVVVEMRRVEPTAAETALATGDRLWVELCVRDTGIGIPPEALSRLFIAFSQASSGMARRYGGTGLGLAISRQLVELMSGSITVRSQPGVGSRFCVRLPLSPASSDVDVDMLELHDMPALRVLVVDDNETNRTVLENLLGAWGMEVVVANDGVHALERLHAERDAARSFDIALIDMQMPRLDGLQLADRISAEPDFADVKLIMLSSVSSPDDAKRAQAVGFKRFVNKPVRKAELRQAILGVSGVAGAGGGSSRKIGAHILVVEDNPVNQEVIGQMLRHFGCRVQLASSALEGLRALCAERFDLIMMDIQMPGMDGVEALGWFRRGPGERFAFRTPPTTPVVAVTANALGGDRERFLGLGFDEYLSKPFRQSQLHTMLSQRLNIPDTGAGELTPAPAEPALAGAPAIPPAATAGALDAQALQRLRDLDPTGANRLLERVVQAFETSTGRLLPQLDEAHAAGDLDGVKHVAHTLKSSSASIGALKLSALCADIEGMIRNNEVQALGPRVAALRAEIASVRGSLHALLLPAA

SEQ ID NO: 8863 - protein, 230 aa, Triticum aestivum
  misc_feature (144)..(144): Xaa can be any naturally occurring amino acid
  misc_feature (178)..(178): Xaa can be any naturally occurring amino acid
MGSEGPSIVTVHVTGFKKFHGVAENPTEKLVTNIKSFIEKRGLPKNLVLGSCEILETAGQGALGTLYKVLESAIADRENGSSAQGQIIWVHFGVNSGASRFALENQAVNEATFRCPDELGWKPQRVPIVPSDGSILRTRETTLXPVKELTKSLRKTGYDVMPFDDPGQFVCNYVYYHXSLRFQKPPGHSSLWFVDGPPSSPKVEEEGPKIHFPPPPPPPKASWLALKLKK

SEQ ID NO: 8864 - protein, 466 aa, Escherichia coli O157:H7 EDL933
MDQKLLTDFRSELLDSRFGAKAISTIAESKRFPLHEMRDDVAFQIINDELYLDGNARQNLATFCQTWDDENVHKLMDLSINKNWIDKEEYPQSAAIDLRCVNMVADLWHAPAPKNGQAVGTNTIGSSEACMLGGMAMKWRWRKRMEAAGKPTDKPNLVCGPVQICWHKFARYWDVELREIPMRPGQLFMDPKRMIEACDENTIGVVPTFGVTYTGNYEFPQPLHDALDKFQADTGIDIDMHIDAASGGFLAPFVAPDIVWDFRLPRVKSISASGHKFGLAPLGCGWVIWRDEEALPQELVFNVDYLGGQIGTFAINFSRPAGQVIAQYYEFLRLGREGYTKVQNASYQVAAYLADEIAKLGPYEFICTGRPDEGIPAVCFKLKEGEDPGYTLYDLSERLRLRGWQVPAFTLGGEATDIVVMRIMCRRGFEMDFAELLLEDYKASLKYLSDHPKLQGIAQQNSFKHT

SEQ ID NO: 8865 - protein, 191 aa, Millettia richardiana
YKFHEDDHGEVVSEIRRSDLEPYLGLHYPATDIPQASRFLFKQNRVRMICDCHAKPVKVIQSEELRQPLCLVNSTLRSPHVCHTQYMANMGSIASLVMAIIVNGNDKTRLWGLLVCHHTSPRYVPFPVRYACEFLMQAFGLQLYMEIQLASQMAEKRMLKTQTLLCDMLLRDAPLGIVTQSPNIMDLVKCD

SEQ ID NO: 8866 - protein, 255 aa, Populus deltoides
MGRGRVQLKRIENNISRQVTFSKRRTGLLKKAHEISVLCDADVAVIVFSTKGKLFEYSTDSSMESILERYERCSYAEQQFVPHGPEHQGSWFLEHPKLRARVELLQRNLRNYTGQDLDPLSYKELHHLEQKIDTALKSVRSRKNQLVHESLAEMQKKEKALQDQNNILVEQVKKKLKALTEQAQWEQQNLGQNSSSFMLPQAQPPLQPSMLSHPPPTLGGSFQIRGFLNGNKDVEVQTQPSTMPHWMLRHVNDRI

SEQ ID NO: 8867 - protein, 356 aa, Nicotiana tabacum
MDKYELVKDIGSGNFGVARLMRHKETKELVAMKYIERGHKIDENVAREIINHRSLRHPNIIRFKEVLVTPTHLAIVMEYAAGGELFERICNAGRFSEDEARYFFQQLISGVHYCHNMQICHRDLKLENTLLDGSPAPRLKICDFGYSKSSLLHSRPKSTVGTPAYIAPEVLSRREYDGKLADVWSCGVTLYVMLVGAYPFEDQEDPKNFRKTIQRIMAVQYKIPDYVHISQDCRHLLSRIFVANPARRITIKEIKSHPWFLKNLPRELTEAAQAAYYRRENPTFSLQSVEEIMKIVEEAKTPAPASRSVSGFGWGGEEEEEEKEGDVEEEEEDEEEEDEYEKQVKQAHESGEVRLT

SEQ ID NO: 8868 - protein, 156 aa, Arabidopsis thaliana
MSLVPTFFGGRRTNVFDPFSLDVWDPFEGFLTPGLTNAPAKDVAAFTNAKVDWRETPEAHVFKADVPGLKKEEVKVEVEDGNILQISGERSSENEEKSDTWHRVERSSGKFMRRFRLPENAKVEEVKASMENGVLSVTVPKVQESKPEVKSVDISG

SEQ ID NO: 8869 - protein, 287 aa, Suaeda salsa
GVHTFTLINRSGKVTYVKFHWRPTCGEKNLLEDEAIRVGGENHSHATQDLYETIAAGNFPEWKLYIQTMDPADEDKFDFDPLDTTKTWPEDILPLQPVGRLVLNKNVDNFFTENEQLAFYPAHVVPGIYFSNDKMLQARTFAYADTHRYRLGVNYLQLPVNAPKCPHTNNHRDGAMTMIHRDEEIDYFPSRFDPVREAERHPIPTAIISGRREKQIIPKENNFKEPGDRYRSWDPARQERFVGRFVKALSDPRLTYEICSIWETYLSQADKSLGMKVASRLNVRPTM

SEQ ID NO: 8870 - protein, 540 aa, Parachlamydia sp. UWE25
MAAKIIKFKEDARQKILKGVRTLADAVKVTLGPKGRNVVIDKSYGTPHITKDGVTVAKEIELEDKFENMGAQMVKEVASKTADKAGDGTTTATVLAEAIYSEGLRNVAAGANPLDLKRGMEKAVKVIVQELKKRSKTVDDRNEIAQVATISANNDAEIGEMIAQAIEKVGRDGTITVEEGKGFETELDVVKGMKFDRGYLSAYFMTNSESQECILEDAYVLIYEKKISAIKEIIPLLQAVVETGRPLLIIAEDVEGEALATLVVNRLRAGLKVCAVKAPGFGDRRKAMLQDIAILTGGELISEEIGLKLETTTIEQLGRVKKAVLTKDETTLVEGAGTKAAILDRASQIKRQIEESTSDYDKEKLQERLAKLVGGVAVIHVGAATEIEMKEKKDRVDDAQRATAAAVEEGILPGGGTAFIRCIPAVNSLADSLEGDEKTGAKIMARSLSAPLRQIAENAGQEGAIILQAVEKMKEKEGYNALTGEYVDMITAGILDPTKVVRCALENAVSVAAMLLTTEAIVADIPEEKPAPAAPVGMDY

SEQ ID NO: 8871 - protein, 201 aa, Millettia richardiana
FPEDDHGEVIAEITKPGLEPYLGLHYPATDIPQAARFLFMKNKVRMIVDCRAKHVNVLQDKKVPFDLTLCGSTLRAPHSCHLQYMENMNCSASLVMAVVVNDNDEDGDSDAVQPQKRKRLWGLVVCHNTTPRFVPFPLRYACEFLAQVFAIHVNKELELEYQIVEKNILRTQTLLCDMLMRDAPLGIVTQRPNIMDLVKCD

SEQ ID NO: 8872 - protein, 178 aa, Piscidia piscipula
LHYPATDIPQATRFLFMKNKVRYIVDCRAKHVKVLQDKKVPFDITLCGSTLRAPHSCHLQYMENMNCSASLVMAVVVNDNDEDGDSDAVQPQKRKRLWGLVVCHNTTPTFVPFPLRYACEFLAQVFAIHVNKELELEYQIVEKNILRTQTLLCDMLMRDAPLGIVTQRPNIMDLVKCD

SEQ ID NO: 8873 - protein, 155 aa, Triticum aestivum
LYRTSLYKKAGWYRSGIPGISSTHASVPTGRFDVLSKADGVPLVAIRLKDSTNFSVFDISENLRRFGWIVPAYTMPADAEHVAVLRIVIREDFNRSLAQRLLADINKIVAELDAHAVHAIKLSNAAAAEGASKSTVDAVTEAFKGLAGNKKAGVC

SEQ ID NO: 8874 - protein, 152 aa, Piscidia piscipula
AYKFHEDDHGEVIAEITKPGLEPCLGLHYPATDIPQAARFLFMKNKVRMIVDCHAKHVKVLQDEKLPFDLTLCGSTLRAPHSCHLQYMANMDSIASLVMAVVVNDNEENGDGSDAVQPQKRKRLWGLVVCHNTTPRFVPFPLRYACEFLAQV

SEQ ID NO: 8875 - protein, 481 aa, Streptococcus pyogenes
DHFENMGAKLVSEVASKTNDIAGDGTTTATVLTQAIVHEGLKNVTAGANPIGIRRGIETATATAVEALKAVAQPVSGKEAIAQVAAVSSRSEKVGEYISEAMERVGNDGVITIEESRGMETELEVVEGMQFDRGYLSQYMVTDNEKMVADLENPFILIMDKKVSNIQDILPLLEEVLKTNRPLLIIADDVDGEALPTLVLNKIRGTFNVVAVKAPGFGDRRKAMLEDIAILTGGTVITEDLGLELKDATMTALGQAAKITVDKDSTVIVEGSGSSEAIANRIALIKSQLETTTSDFDREKLQERLAKLAGGVAVIKVGAPTETALKEMKLRIEDALNATRAAVEEGIVAGGGTALITVIEKVAALELEGDDATGRNIVLRALEEPVRQIALNAGYEGSVVIDKLKNSPAGTGFNAATGEWVDMIKTGIIDPVKVTRSALQNAASVASLILTTEAVVANKPEPAAPAPAMPAGMDPGMMGGF

SEQ ID NO: 8876 - protein, 349 aa, Anabaena variabilis ATCC 29413
MAKASESLDLSVNESTDKALDRDCTTLSRHVLQQLQSFSADAQDLSALMNRIALAGKLVARRLSRAGLMEGVLGFTGEVNVQGESVKKMDVYANDVFISVFKQSGLVCRLASEEMDEPYYIPENCPVGRYTLLYDPIDGSSNTDTNLSLGSIFSIRQQEGDDSDGQAKDLLTNGRKQIAAGYILYGPSTMLVYTMGKGVHSFTLDPSLGEFILSEENIRIPDHGAVYSVNEGNFWQWEESMREYIRYVHRTEGYTARYSGAMVSDIHRILVQGGVFLYPGTVQNPEGKLRLLYESAPLAFLIQQAGGRATTGLVDILDVVPKKLHQRTPLIIGSKEDVAKVESFIQNGH

SEQ ID NO: 8877 - protein, 559 aa, Schizosaccharomyces pombe
LTMCGILAVHHVAEDIEAFKPKALHLSKQLRHRGPDWSGKAIRNQTILCHERLAIVGVESGAQPLVSDDGKLVLTVNGEIYNHLKLRENLKGNYKFKTYSDCEVILYLYREHGPACANMLDGMFSWVLYDQDKDKVVAARDPIGITTLYQGFSSDSPDTAYFASELKALHPVCDKIIAFPPGHYYDSETKQTVRYFKPSWWDENKIPSNPVDYKLLRETLEASVRKRLMAEVPYGVLLSGGLDSSLIASIAARETEKLANSTSQSEEARTITAWPKLHSFAIGLPGSPDLLAARKVADFLHTFHHEHTFTIDEVLMLFVTLFTILRHMMLPLSVQVPPCIYYLVKSRLKVLKWFCLVRDLTKSLVDTYISVMPPLVRPSIPSVCVVLRTCTYPNACVLTSQLWLGVLRLVFLSWIRTFWKLLLTLILRRKCILTVVKKNIFFAKALDTTHDSSLQPYLPQDILWRQKEQFSDGVGYSWIDALKDTAELCISDDEFALPRREWGDDIPTTKEAFWYRKLFDEIFPRQCADTVMRWVPKAEWGCPEDPSGRYQAGHVAALK

SEQ ID NO: 8878 - protein, 449 aa, Synechococcus sp. CC9605
MVRSQRLRSLVRSTPLLLILGVGGVVTAMGISSPGLSLPSASGGSIYDSPKEVIDQVWQIVYRDYLDSTGSYDEATWRQLRSNLLSKSYGGSAESYEAIRGMLASLDDPYTRFLDPKEFKEMQIDTSGELMGVGIQLSLDKDTKELIVVSPIEGTPASRAGVQPKDVIVSIDGASTKGMTTEDAVKLIRGPEGTDVLLGLRRQGQVLNVPLKRARIEIHAVKAMLNTAPNGRKVGYIRLKQFNANATREMRAAIKDLESQAAEGYVLDLRSNPGGLLEASVDIARQWLNEGTIVSTRTREGIRDVRRATGSAVTDKPLVVLIDQGSASASEILSGALQDNSRAQLVGQKTFGKGLVQAVRGLADGSGLTVTIAKYLTPKGTDIHKNGIQPDIEAAMSKKESKNFSVEDLGTQKDSQYKTAEGTLLNQLKKSQAGTTYQPGRANLSFALQ

SEQ ID NO: 8879 - protein, 305 aa, Synechococcus elongatus PCC 6301
MLKVKNCKVAAYMSSEPSDGHDLRRSFRDRQELIDYLQQQFPEAAAVDAQVSPIPGGYQAAIAQLEAINPLRYGKSRNFLDGAVTRLSPYIRHGVLSLATVRDRVLAQIRQRSDGEKLITELAWRDYWQRIYWEWGDRIWRDREPYKTGWDSQQYSEALPPDLQAAETGLACMDRFSRELKETGYLHNHARMWMAAYLVHWRRIRWQAGARWFLQHLLDGDPASNNLSWQWVASTFSTKPYWFNRENLQRYNGDRDCQDCPSRDRCPFDGSYDELADQLFPKAEFRDQPRQGGRWHRDRSNSRQR

SEQ ID NO: 8880 - protein, 833 aa, Triticum aestivum
VRSGRLADSITTRGWRRFAVSGATLGVARAGVGVARAGSERRGGADLPSLLLRKKDSSRAVLSRAASPGKVLVPDGESDDLASPAQPEELQIPEDIQEQTAEVNMTGGTAEKLQSSEPTQGIVETITDGVTKGVKELVVGEKPRVVPKPGDGQKIYEIDPTLKDFRSHLDYRYREYKRIRAAIDQHEGGLEAFSRGYEKLGFTRSAEGITYREWAPGAHSAALVGDFNNWNPNADAMTRDDYGVWEIFLPNNADGSSAIPHGSRVKIRMDTPSGVKDSISAWIKFSVQAPGEIPFNGIYYDPPEEEKYVFQHPQPKRPESLRIYESHIGMSSPEPKINSYANFRDEVLPRIKRLGYNAVQIMAIQEHSYYASFGYHVTNFFAPSSRFGTPEDLKSLIDRAHELGLLVLMDIVHSHSSNNTLDGLNGFDGTDTHYFHGGPRGHHWMWDSRLFNYGSWEVLRFLLSNARWWLEEYNFDGFRFDGVTSMMYTHHGLQMTFTGNYGEYFGFATDVDAVVYLMLVNDLIHGLYPDAVSIGEDVSGMPTFCIPVPDGGVGFDYRLHMAVADKWIELLKQSDESWKMGDIVHTLTNKRWLEKCVTYAESHDQALVGDKTIAFWLMDKDMYDFMALDRPSTPRIDRGIALHKMIRLVTMGLGGESYLNFMGNEFGHPEWIDFPRGPQTLPTGKVLPGNNNNYDKCRRRFDLGDAEFLRYRGMQEFDQAMQHLEEKYGFMTSEHQYVSRKHEEDKVIIFERGDLVFVFNFHWSNSFFDYRVGCSKPGKYKVALDSDDALFGGFSRLDHDVDYFTTEHPHDNRPRSFSVYTPSRTAVVYALTE

SEQ ID NO: 8881 - protein, 250 aa, Neisseria meningitidis Z2491
MKITPVKALTDNYIWMIQHGNHAVCVDPSEPSPVLEFLVRNRLMLAQTWVTHPHPDHEGGAAALWRGYMESPVYGESDIEAATHTVTAGTQFTFGDGQVTVWATPGHTDRHTSYLLETSDGIHVFCGDTLFSAGCGRVFTGTIEQLYDSFQRFNRLPENTLFYPAHEYTAANLRFAAHIEPDNADIQTALKAAERTPTLPVTLAHERRVNPFLRTEIPAVRQRAEALVGKTLNSGLEVFAALRELKNAYC

SEQ ID NO: 8882 - protein, 290 aa, Corynebacterium diphtheriae NCTC 13129
MVTMKQHENIIPTITLNDGTEMPAIGFGTYKLREQDAYRAVRSAIEVGYRHIDTASLYKNEEEVGRAVADAITAGEVARDELFITTKVWNDMHGDQLTQRSFQESLHRLGLDYIDCCMVHWPWPQKGLYVESFAALAKIQGLGQLQSVAVANFYPEVLREIVAETGIAPVLNQVELHPGFSQAEQRAVDRELGVVTEAWSPLGRGDSLNAEAITLIAQCYEKTPAQVTLRWIHQLGCSVVPKSANPQRQRENLDIFDFELNTEDMNSITSLDEQGGRLFVDPHDFPGEVE

SEQ ID NO: 8883 - protein, 886 aa, Neurospora crassa
MCLAFVPLPTEALAYAFNIWAGQLTVHAPAGQMTTTHVLSLPFRKSTQLSLSRAIQQYISAKYDQHPDMFRHDLDTIDALRRDAINVREAHPSGIRKLQMYAAQLVWIGGKFPIDVGADFTWYPALGYHTEHPLVQNNLKYELMNVLYNLAALYSQLAVASNRNSTEGLKTAASWFSHSAGVLTHIKTQVLPELRMPSPPDDMDETTLESLIQLFLAEAQECYWQKAVMDGYKDASIAKLAARVSDLYNEAGEAAMRSEAISSAWIHHMSAKHHHFAAAAQFRAASDCLERKKYGEEIARLRDAVACVNEGLKETRGGYLSKAVVEDLQGLKRRLEEDLKRAEIDNDRVYLHIVPPKTELKRLDRANMAVARVPPQVAKPYEFLGDPSAEFGPALFTKLVPFAVHVAVSIYEERRDRLVNNSIISELESMTSQLHEILSSLNLPGSLQALEKPLGLPGTLVQHADEIRQADALYRLQQGLTDIDKLCSSDLAIFEEGRSLLLAEEEEDSRLRLKYGTERWNRPQSRQDPSPNGGTKLWRQAQDIEGYFGSSTASDQVVREKFNAVRDTLTILAGSDRSIMDFIPNSRRTDIPESLKPALGRLRSAYNDVQRLESRRRKRVESLRARSRADDIKPDILVEAARLERAYPTTAIATAHFEDFFEKRLDRLYESELEAVERDKQEQEKIVQEVKRANKEFEAQKRQVDRAGGGNREREEALQKLDAAYYKYKEIVSNVEVGRKFYNDLSQIVEQWRGLVRGWVSERRRDARSLEEEINMPPLSSLNMHQSSFSYQQQQHHQQPPPPPPQIPFPEPIQPHQPIVEQAHIQSWADNVPQQQPKPVAPGAWAPNMGIKFGSPVAQGQQHQQEQGQPGPVNATWDPSQGIRFG

SEQ ID NO: 8884 - protein, 402 aa, Nostoc sp. PCC 7120
MSDEAERQRGNNLYKNSPLLPVSISQVSTSQLRETEIMSTNINLFSSYQLGELELPNRIVMAPLTRQRAGEGNVPHQLNAIYYGQRASAGLIIAEATQVTPQGQGYPHTPGIHSPEQVAGWKLVTDTVHQQGGRIFLQLWHVGRISHPDLQPDGGLPVAPSAIAPKGEVLTYEGKKPYVTPRALDTSEIPAIVEQYRQGAANALAAGFDGVEIHAANGYLIDQFLRDGTNQRTDEYGGAIENRARLLLEVTEAITSVWDSQRVGVRLSPSGTFNDIRDSHPLETFGYVAQALNRFNLSYLHIFEAIDADIRHGGTVVPTSHLRDRFTGTLIVNGGYTREKGDTVIANKAADLVAFGTLFISNPDLPERLEVNAPLNQADPTTFYGGGEKGYTDYPFLAVANK

SEQ ID NO: 8885 - protein, 445 aa, Phalaenopsis hybrid cultivar
MSKMFGKEVPLSKMAVSKAHGEGSPYFAGWKAYEENRYDAVGNPDGVIQMGLAENQLSFDLLEEYLELHPEAFSWASDSSSFRENALFQDYHGLQTLRQALASFMEKIRGGRSKFDANRIVLTAGATAANEILTFILADRGDALLVPTPYYPGFLRDLQWRTGVTIFPVHCYSSNGFQLTLSSLEKAYAEAKASNFNVRGLLMTNPCNPLGTSASLSLLQDIIHFISDKNIHLISDEIYSGSVFSSTNLFSISDLITDAISEQVHIVYSLSKDLGLPGFRVGALYSYNDRVVKTARRMSSFSLVSSQTQRLLSFMLSDEEFTVRYIEKNRERLRERYELVVNGLKEAGIECLKGEAGLFCWVNMEKLMEEETKEGEAELWKVIIDDLKLNISPGSSCCCAEPGWFRLCFANMSRETLEVALKRLKDFAQKKVAAKKKKMNNVYFC

SEQ ID NO: 8886 - protein, 514 aa, Actinoplanes missouriensis
MTTPEDRTTMIGNTTSRLAADQRAMDSVISGATHDPHAILGAHPHGGHTVIRALRKGATTVAVLHDGERTEMTAVHPDGIFAAELAGTVLDYRLDVDGTQCDDPYRHLPTLGELDLHLIGEGRHEKLWKVLGAQPRGTGVAFAVWAPSAQGVQVIGDFSGWGPYDGWPMRSLGSSGVWELYVPSAHIGSKYKFKILGRDGVWREHADPVAQHTEVPPATASVVYQSSYSWHDEQWMRERARKSWHQEPISCYEVHLGSWRPGLTYTELAEQLVEYVLEIGFTHVELMPVMEHPFGGSWGYQVTGYYAPTSRFGSPDEFRFLVDKLHQAGIGVILDWVPAHFPKDEWALARFDGTPLYEHGDWRRGEQPDWGTYVFDFGRKEVRNFLVANALYWCEEFHADGLRVDAVASMLYLDYSRKDGEWTPNQYGGRENLDAISFLQEMNATVYKHHPGVMTIAEESTAWPGVTRPTHLGGLGFGFKWNMGWMNDTLSYIEKEPIYRQWHHHQMTFATVYA

SEQ ID NO: 8887 - protein, 652 aa, Kluyveromyces lactis NRRL Y-1140
MNDIFAIPFKRALQINLKDAFTVVINNTFYQTAASVEADLTQLDKYRDVLFHLDVCQADLNMLKQYYMALKAIAVKLPDDQVEFTWFNTLGLKSSGMTRNSLRFETFNVLYNIGAMYSSLAVEQRLESTEGLKESCRLFKLSAGCFKFIYEHEVSNNFKFFDEYTLNALVSMMLAQAQQMVWKKACFDDIERHSILSRLALQVALFYQTASKNSNCSPYIRTDWVKSLTSKSHYFMAIAYYRSGLHQVQKQNYAQGICDFQYALTWINKLSLDDELTEWRGEVQALLESAERDNDLIYLQASVQNPSKVKPVMMVQADLFDEIEKKDGNIFKNLLPIDVLESCNAFNERVETYVKEHISNPLESMNKLLISNTPQYMDFKSYYISEQEWNSYSDSLQDLEQLRAYVAGELKLSESILQKDIQENEQMIREHGLLRWKIPSKDKKIESLLADLTNIRNYIENGMKVDTETASLFKTLDHDLVTNVSQPPESSDPIMKEASLILQGRKNHILAAERKIIENRLLPKIVSYYKKTGSKDFEPVFQEHIRMFDGDLLQVQKEKAKNKEMLTKVTLSSPEQVQISRNDPRTLYLEELKHSSNVLSELKENIISGKQFYQDLITALESKLKEIEDYVNERKLQRTELNDTLLCDTNES

SEQ ID NO: 8888 - protein, 389 aa, Leuconostoc mesenteroides subsp. mesenteroides ATCC 8293
MAPTTLKSSLEDGSVSDNELKYYQMRSNGPGMIIVEAAYVNELGKGWEGGLSAADDDKIEGLSRLASAIHSGGAKAILQLFASGRQSNQTILRGEQIVSASAQPYPHGSHETPRELKHEEISQTIEDFAAATKRAILAGFDGVELHGANLYLLQQFFSPESNRRQDIWGGTLEKRMRFGLAVTAKVGDTIDKYAERPFLLGYRQSPEESTTPGITLADSLAFVQRLVTLQIDYLHLSLKDAFQKPFRDAKAVKQITTYYTEVLPDNVPLMVAGLIKQPMQVESLLDEGVTFAAMGRALIADPNWVQKVKLNDEKSIRYAVSPADFDLLGVPKPLKKWLLTRFKNGFPVTTDIEFDPKTPWKYYKSMPTQPRQQIDPTKLMTLKKRVDDN

SEQ ID NO: 8889 - protein, 192 aa, Piscidia piscipula
AYKFHEDDHGEVVSEIRRSDLEPYLGLHYPATDIPQASRFLFRQNRVRMICDCHAKPVKVIQSEELRQPLCLVNSTLRSPHVCHTQYMSNMGSIASLVMAIIVNGNDKRRLWGLLVCHHTSLRYVPFPVRYACEFLMQAFGLQLYMEIQLASQMAEKRMLKTQTLLCDMLLRDAPLGIVTQSPNIMDLVKCD

SEQ ID NO: 8890 - protein, 443 aa, Glycine max
MDRRSHPTGTVSTRNILFNKYEIGKLLGQGNFAKVYHGRNLSTNESVAIKVIKKERLQKERLVKQIKREVSVMRLVRHPHIVELKEVMANKAKIFMVVEYVKGGELFAKVAKGKLTEDLARKYFQQLISAVDFCHSRGVTHRDLKPENLLLDQNEDLKVSDFGLSTLPEQRRADGMLVTPCGTPAYVAPEVLKKKGYDGSKADLWSCGVILFALLCGYLPFQGENVMRIYRKAFRAEYEFPEWISPQAKNLISNLLVADPGKRYSIPDIMRDPWFQVGFMRPIAFSIKESYVEDNIDFDDVENNQEEEVTMRKPARPFYNAFEIISSLSHGFDLRSLFETRKRSPSMFICKFSASAVLAKVEAVAKKLNFRVTGKKEFVVRMQGTEEGRKGKLAMTVEVFEVAPEVAVAEFTKSAGDTLEYVKFCEEQVRPSLKDIVWSWQGD

SEQ ID NO: 8891 - protein, 547 aa, Mannheimia succiniciproducens MBEL55E
MAAKDVKFGNDARVKMLAGVNVLADAVKVTLGPKGRNVVLDKSFGAPTITKDGVSVAREIELEDKFENMGAQMVKEVASKANDAAGDGTTTATVLAQAIVNEGLKAVAAGMNPMDLKRGIDKAVAAVVTELKALSKPCETSKEIEQVGTISANSDSIVGQLIAQAMEKVGKEGVITVEDGTGLEDELDVVEGMQFDRGYLSPYFINKPETATVELDSPFILLVDKKISNIRELLPVLEAVAKAGKPLLIIAEDVEGEALATLVVNTMRGIVKVAAVKAPGFGDRRKAMLQDIAILTAGTVISEEIGMELEKATLEDLGQAKRVVINKDNTTIIDGIGDEAQIKGRVAQIRQQIEESTSDYDKEKLQERVAKLAGGVAVIKVGAATEVEMKEKKDRVEDALHATRAAVEEGIVAGGGVALIRAASKAAASLQGDNEEQNVGIKLALRAMESPLRQIVANAGEEASVVASAVKNGEGNFGYNAGTEQYGDMIAMGILDPTKVTRSALQFAASIAGLMITTEAMVTELPKDDKLDAAAAMGGMGGMGGMM

SEQ ID NO: 8892 - protein, 203 aa, Millettia grandis
MAYKFHEDDHGEVIAELKKPGLEPYLGLHYPATDIPQATRFLFMKNKVRMIVDCRAKHVKVLQDKKIPFDLTLCGSTLRAPHSCHLQYMENMNSSASLVMAVVVNDNDEDGDSSDAVQPQKRKRLWGLVVCHHTTPRFVPFPLRYACEFLAQVFAIHVNKELELEYQIVEKNILRTQTLLCDMLMRDAPLGIVSQRANIMDLV

SEQ ID NO: 8893 - protein, 578 aa, Zea mays
MAAASLRKGNARLPPEVNRALFVRNLPFNISSEEMYDIFGKYGAIRQIRLGNAKDTRGTAYVVYEDIYDAKNAVDHLSGFNVANRYLIVLYSQLNRMSKKTDIKKKEDEITRLQENETGSSMVSSTENKMNELVSPVARAAKPSRQLNFIDISCLATFEVLKNTCRQILVASLSLASFSVARGRSPHSTTSSATTTLNAYFFLRFSDECVLLVAAASLSSLPRSMAMKPVDDAPSNYPTTVVDVSTLRTNHAVGQTQIAPSDDHARTPCTSHAEGLIPNLVDVSEDVPLVDWSTLHIVESYDEEGRLAVMADEQMYASLGLMIDDEIGANQGGVIQEIDAHGCSAHDVGGYIHETEYPNQAEDLTPSNSLFIYDKDNPKIELGTMFPDMKAFRLALRQYAINKEFELATEKSCKTKFRGHCKQKTNDCPWQIVGAKMKILPTIKVTLLVDEHKCTSSSRILTTMPSQAWVADKALPLLRKNPNMGAKAMQIYLQDEYNVTIGYDTVWRGRERALHELYGGWNESFSLLLNWKADVEKRSPGSVVEIDTKIVDEKNPTGGSGQAIFAGEGMADKDQSHD

SEQ ID NO: 8894 - protein, 205 aa, Millettia grandis
AYKFHEDDHGEVIAEVKRPGLEPYLGLHYPATDIPQAARFLFMKNKVRMIVDCHAKHVKVFQDEKLPIDLTLCGSTLRAPHSCHLQYMANMDSIASLVMAVVVNDNEEDGDSSDAVQPQKRKRLWGLVVCHNTTPRFVPFPLRYACEFLAQVFAIHVNKEIELEYQIIEKNILRTQTLLCDMLMRDAPLGIVSQSPNIMDLVKCD

SEQ ID NO: 8895 - protein, 180 aa, Tephrosia villosa
GLHYPATDIPQAARFLFMKNKVQMIVDCHAKHVKVLQDEKLPLDLTLCGSTLRAPHSCHLQYMANMDSIASLVMAIVVNDNEEDGDSSDAVQPQKRKRLWGLVVCHNTSPRFVPFPLRYACEFLAQVFAIHVNKEIELEYQIIEKNILRTQTLLCDMLLRDAPLGIVSQSPNIMDLVKCD

SEQ ID NO: 8896 - protein, 130 aa, Arabidopsis thaliana
  misc_feature (3)..(4): Xaa can be any naturally occurring amino acid
  misc_feature (11)..(11): Xaa can be any naturally occurring amino acid
  misc_feature (17)..(17): Xaa can be any naturally occurring amino acid
  misc_feature (34)..(34): Xaa can be any naturally occurring amino acid
  misc_feature (52)..(52): Xaa can be any naturally occurring amino acid
  misc_feature (75)..(75): Xaa can be any naturally occurring amino acid
KLXXDLLVENXKETGWXTPIHVDAASGGFIAPFXYPELEWDFRLPLVKSINXSGHKYGLVYAGIGWVIWRNKEDXPEELIFHINYLGADQPTFTLNFSKGSKASQLNTQLYPQFGATEGPGNFGDFQGGF

SEQ ID NO: 8897 - protein, 152 aa, Zea mays
MSLVRRSNVFDPFSMDLWDPFDTMFRSIVPSATSTNSETAAFASARIDWKETPEAHVFKADLPGVKKEEVKVEVEDGNMLVISGQRSREKEDKDDKWHRVERSSGQFVRRFRLPENTKVDQVKAGLENGVLTVTVPKAEEKKPEVKAIEISG

SEQ ID NO: 8898 - protein, 105 aa, Candida albicans SC5314
MNQQNARDIELREQDRWLPIANVARIMKNTLPPTAKVSKDAKECMQECVSEFISFITSEASDKCLKEKRKTINGEDILYSMYDLGFENYAEVLKIYLAKYREARK

SEQ ID NO: 8899 - protein, 481 aa, Capsicum annuum
MDSITIDTINPKVLKCEYAVRGEIVTIAQKLQQDLKDNPGSHPFDEILYCNIGNPQSLAQQPITFFREVLALCDHPSILDKSETQGLFSADAIERAFQILDQIPGRATGAYSHSQGIKGLRDTIASGIEARDGFPADPNDLFLTDGASPAVHMMMQLLIRSQNDGILCPIPQYPLYSASIALHGGTLVPYYLDEQTGWGLEISELEHQLNTAKSNGIDVRALVVINPGNPTGQVLGEANQREIVEFCKKEGLVLLADEVYQENVYVPDKKFHSFKKITRSMGYGEKDISLVSFQSVSKGFYGECGKRGGYMEITGFSPEVREQIYKLASVNLCSNISGQILASLVMSPPKVGDESYESFSAEKEAVLSSLARRAQALQDALNSLEGVTCNRAEGAMYLFPRINLPDKAIKAAEVAKTAPDAFYAKLLLNATGIVVVPGSGFRQVPGTWHFRCTILPQEEKIPAIVSRLTEFHKKFMDEFCG

SEQ ID NO: 8900 - protein, 338 aa, Ralstonia solanacearum
MKRINLTRYLIEEQREHNTIPAELRLLLEVVARACKAISHSVNKGALAGVLGSAGTGNVQGETQQKLDVIANEVLLEANEYGGNLAAMASEEMESFYEIPHRYPKGEYLLLFDPLDGSSNIDVNVSIGTIFSVLHMPKPGQTVTEADFMQPGVRQVAAGYAVYGPQTTLVLTVGNGVHMFTLDREVGSFILTNRDVKIPADTKEFAINMSNMRHWAPPVRRYIDECLAGTEGPRGKDFNMRWIASMVADVHRILTRGGIFMYPWDKREPGKAGKLRLMYEANPMAFLVEQAGGAATNGHQRILEIQPEKLHQRVAVILGSKNEVDRVTQYHREAQQTA

SEQ ID NO: 8901 - protein, 235 aa, Agapanthus praecox
MGRGKIEIKRIENTTNRQVTFCKRRNGLLKKAYELSVLCDAEVALIVFSTRGRLYEYSNNSIKSTIERYKKACADSSNSTAVVEVNTQQYYQQEAAKLRHQIQSLQNSNRHLMGDSLSSLSIKELKQLENRLERGITRIRSKKHELLFAEIEYMQKREAELQNDNMYLRAKITDNERAHQVSVVQSGTEYDTLPTFDSRNYYTHVTMLEAAPHFSHHQDHTALHLGYETKADPTE

SEQ ID NO: 8902 - protein, 476 aa, Cyanidioschyzon merolae
MTAKVESKVREEEKGSNPSTAAADDSGAVIPTLKPRPKPAVEPLEREGVEFDPQRGLVFEKTRSSKWMSEKELNELPLLQRINWLSTSIIFTPLIGTLIGIWFVPLQRKTLVLAIVTYFCCGLGITGGYHRLWSHRSYEAHWLVQVILACFGAAAFEGSARYWCRLHRAHHRYVDSDRDPYAVEKGFWYAHLWWMVFKLPRQRQGRVDITDLNANPILRFQHRYYLQIAILFSFVIPLTISTLGWGDFWGGLVYACLGRMLFVQQSTFCVNSLAHWWGEQTFSRRHTSYDSVITALVTLGEGYHNFHHEFPHDYRNGVVWYHWDPTKWVIRLLSWAGLAWHLVRFPRNELVKARLQVRQEILDEAKKRVDWGKPIESLPVWTWKDVQRLAKEENRLLVVIEGIVHDCTRFKVQHPGGQRILEFWNVRDATQAFNGDVYNHTKAARNLLAHLRVAQLKEIYEPECDESTTEMSTKSS

SEQ ID NO: 8903 - protein, 376 aa, Triticum aestivum
  misc_feature (233)..(233): Xaa can be any naturally occurring amino acid
  misc_feature (268)..(268): Xaa can be any naturally occurring amino acid
  misc_feature (324)..(324): Xaa can be any naturally occurring amino acid
MAATVAVDNLNPKVLKCEYAVRGEIVIHAQRLQQQLKTQPGSLPFDEILYCNIGNPQSLGQQPVTFFREVLALCDHPDLLKKEEIKTLFSADSISRAKQILALIPGRATGAYSHSQGIKGLRDAIASGIASRDGFPANADDIFLTDGASPGVHLMMQLLIRNEKDGILVPIPQYPLYSASIALHGGSLVPYYLNESTGWGLEISDVKKQLEDARSRGIDVRALVVINPGNPTXGQVLAEENQYDIVKFCKNEGLVLLADEVYQENIYXDNKKFHSFKEDSEILGDTAREDLPLVSYQSVSKGILWVSVGKRGWVTWEITGLQCXPLREQIYKIASVNLCSNITGQILASLVMNPPKASDESYASYKAEKEGPCTLL

SEQ ID NO: 8904 - protein, 423 aa, Thermus sp. Z-1
MTENAEKFLWGVATSAYQIEGATQEDGRGPSIWDAFAQRPGAIRDGSTGEPACDHYRRYEEDIALMQSLGVGAYRFSVAWPRILPEGRGRINPKGLAFYDRLVDRLLASGITPFLTLYHWDLPLAQEERGGWRSRETAFAFAEYAEAVARALADRLPFFATLNEPWCSAFLGHWTGEHAPGLRNLEAALRAAHHLLLGHGLAVEALRAAGAKRVGIVLNFAPRYGEDPEAVDVADRYHNRFFLDPILGKGYPESPFRDPPPVPILSRDLELVARPLDFLGVNYYAPVRVAPGTGTLPVRYLPPEGPATAMGWEVYPEGLYHLLKRLGREVPWPLYVTENGAAYPDLWTGEAVVEDPERVAYLEAHVEGRLRAREEGVDLRGYFVWSLMDNFEWAFGYTRRFGLYYVDFPSQRRIPKRSALWYQ

SEQ ID NO: 8905 - protein, 315 aa, Brassica napus
  misc_feature (115)..(115): Xaa can be any naturally occurring amino acid
WPNALRYFELNTGAKIPSVGLGTWQASPGLVGDAVAAAVKIGYRHIDCAQIYGNEKEIGTVLKKLFEDNVVKREELFITSKLWCTDHDPQDVPEALKRTLQDLQLDYVDLYLMHXPVRMKKGSVGAKPENLLPVDIPSTWKAMEALHDSGKARAIGVSNFSTKKLADLMELARVPPAVVQVECHPSWRQTKLREFCKSKGLHLTAYSPLGSPGTTWLKSDVLKNPILNTVAKKLGKSAAQVALRWGLQMGNSVLPKSTNEGRIRENFEVFDWSIPDDLFSKFPEIEQARLLTAPFFVHETLSPYKSLEELWDGEI

SEQ ID NO: 8906 - protein, 532 aa, Oceanobacillus iheyensis HTE831
MAKKDESMNKSNLENDMSLTNRQGHPVTNNQNIRTVSNRGPATLENYDFIEKISHFDREKVPERIVHARGAGAHGYFETYGTVGNDPVSKYTRAKVFQDKGKQTPVFVRFSTVVHGNHSPETVRDPRGFAVKFYTEDGNWDLVGNNLKIFFIRDAMKFPDMIHAFRPDPVTNIQDSERFFDFCANSPESFHMVTFVYSPWGIPANYRMMQGSGVNTYKWVNKDGEAVLVKYHWEPKQGIKNLTTKEAEEIQATNFNHATQDLYDAIENGDYPEWELFVQIMSDDEHPELDFDPLDDTKLWPEDQFPWHPVGKMVLNKNPENYFTEVEQAAFGTGVLVDGLDFSDDKMLQGRTFSYSDTQRYRVGANYLQVPVNESKKRVATNHEGGQMRQKNDKAPSQNPHINYEPSVLGGLEENEQTGKEYTPHIEGNLVRESIDRNDNTKQAGHTFREFEEWEKAELISNLVGDLSVSDQRIQDKMIALAEEADDEYGRRLREGLEQAKKMGTPHNPLGAKDAEQAPKKAIDKGHDADPY

SEQ ID NO: 8907 - protein, 474 aa, Silicibacter sp. TM1040
MADTRPVIWWIRRDLRLRDNPALRAAQEAGGPIIPLYIHDAQEEALGAAPKFRLGLGLERFAKTLEEKGSRLIVRRGDALEVLREVIAESGAGHVIWSRLYDPAATKRDAKIKEALKASDIKAKSTGGRLLFEPWTVDTKDGGMYRVYTPFWKAVRTRDVAELTAAPSRLAAPESWPSGEALADLGMDAAMRRGGAIVAQHCRVGEDAALAQLDDFLTERVSNYKAHRDFPARAATSELSENLAWGEISPHRMWHLGAQAMQDGQPGAEHFLKEVVWREFAYHLMHRSPRILTRNWREEWDGFPWQDDPGDALQRWQQGQTGYDFVDAAMRELYVTGKMHNRARMIVASFLTKHLMIHWKYGLQWFEDCLVDWDPASNAMGWQWVAGSGPDAAPFFRIFNPDGQLEKFDPKGDYARRWLPEGQANPPETAMAYFEAIPRRWSLHPDQSRVSPIIGLKEGRERALSAYKESRNQS

SEQ ID NO: 8908 - protein, 336 aa, Vibrio fischeri ES114
MSEIRTLGEFIVAKQHDFPHASGELSSLIGSIKLAAKIVNREINKAGLVDITGASGEENIQGEQQQKLDVYANDKFKSALEARDQVCGVASEEEDEAVAFNKELNKNAKYVVLMDPLDGSSNIDVNVSVGTIFSIYRRISPIGTPATEEDFLQPGHKQVAAGYIIYGSSTMLVYTTGNGVHGFTYDPSLGVFCLSHENMQIPKDGNIYSINEGNYIRFPEGIKQYLKFCQESKPEDNRPYTSRYIGSLVADFHRNLLKGGIYLYPSTQAYPNGKLRLLYECNPMAMLIEEAGGKATDGEQRILDIKPSELHQRVPFFVGSTNMVNKVHAFLDEWRD

SEQ ID NO: 8909 - protein, 196 aa, Tephrosia villosa
DRVMAYKFHEDDHGEVIAEIRRSDLEPYLGLHYPATDIPQASRFLFKQNRVRMICDCHAKPVKVIQSEELRQSLCLVNSTLRSPHVCHTQYMANMGSIASLVMAIIVNGNDTTRLWGLLVCHHTSPRYVPFPVRYACEFLMQAFGLQLYMEIQLASQMAEKRILKTQTLLCDMLLRDAPLGIVTQSPNIMDLVKCD

SEQ ID NO: 8910 - protein, 362 aa, Pisum sativum
MGATTTDPIPLLTPYNMGKFKLSHRVVMAPLTRTRSYNNVPQPHAILYYSQRASQGGLLIAEATGVSDTAQGLPDTPGIWTKQQVEAWKPIVDAVHAKGAIFFCQIWHVGRVSNSSYQPNGQAPISSTDKAITSNDQQQFTAPRRLRTDEIPNIVNDFKLAARNAIEAGFDGVEIHGAHGYLLDQFMKDKVNDRTDEYGGSLENRCRFPLEVVEAVVNEIGAERVGIRLSPFAEFAESGDSNPNALGLYMVNALNKYNILYCHMVEPRIIVTFDPVETPHCLEPMRKAFNGTFMVAGGYNRQDGIKAIAENRADLVVYGRWFISNPDLPKRFALNAPLNKYNRETFYSSDPVIGYTDYPFLE

SEQ ID NO: 8911 - protein, 475 aa, Enterococcus faecium
MKLKKNFLWGGSIAAHQCEGAWQEGGKGPAIMDYVRQGSYQVPRQIDTIISSEATYPSHMGIDLYHQYKSDIRLFSEMGFTALRISIDWSRIFPNGDDEQPNQEGIMYYIDVVDTLLSYDIEPIVTLYHFEMPKNLVQKYGSWTNRKVIELYLKFCQTMFESLKGKVHYWVTFNEMNHIDPQTEATDIFTYIIAGLKYSELENKSQTLAEIGYNMTVASCSAIVLGKKIDPENKIGCVFGIEPVYPVDCNPTNVMNAFKQMDRDFYQIDAMCTGKFPDYKINEYADQGIKLTITENDKYMFSKGTLDFIGMNYYASSVAKYEGAAEEKSALFGGLQNPYLVTSKWGWTIDPTGLRYLLNYTYRKYGLPIIITENGLGAIDVLTDDKNIHDEYRIEYLKQHIQQMKIAIEEDQVDCFGYLTWAPIDLVSATTGEMKKRYGFIYVDKDDEGNGTLERYKKDSFYWYKEVIGSNGDIL

SEQ ID NO: 8912 - protein, 473 aa, Xylella fastidiosa Temecula1
MVLLSFSLSAKNPSGVVMSPPVEEMEMPESNDVNVPLDEIRRFVSVYNAIKQAYVDPVNDRKLMHSAVRGLLSDLDPHSTYFDKEDADAFDEQTSGVYDGIGVELQEQSDNTLKVIAPIDDTPAARAGLRPGDLIVAINGKPLANVDAMKPLRGAPGSQVTLTIVRDKNGKPFDMTIKRETIHIASVRSRMLEPGYGYIRISVFQADTGNDFHKHLGQLKQQAGGKLRGLLLDLRSNPGGLLTAAVQVADALLDKGNIVSTRGRISASDTRFDATLGDLLDGLPLVVLVDAGSASASEVLVGALSDNHRARVIGSCTFGKGSVQTLLPLDNGDSVKLTTARYYTPSGRSIQARGIVPDLLLKPDGVGAADLSGSGIDRSEAGLPGHLRGTDEGVPGCTSSDPLPGDTPIMTALLELKQPGSAVQAKKAIPVKVVSDVKSATKSPLSVFGKDRAVKRVPVVSPTSEQVDGQPSK

SEQ ID NO: 8913 - protein, 368 aa, Pisum sativum
MNLNTDAALTTSDPIPLLTPYKMGNFNLSHRVVLAPLTRMRSYNNVPQPIAINYYAQRASQGGFLIAEATGVSDTAQGYPNTPGVWTKDQVEAWKPIVDAVHAKGSVFFCQIWHAGRVSNSIYQPNGQAPISSTDKSLTSNEEQQFTAPRRLRTDEIPDIVNDFKIAARNAIEAGFDGVEIHGAHGYLVDQFMKDKVNDRTDEYGGSLENRCRFALQVVEAVANEIGADKLGIRLSPFAEYAESGDSNPNALGLYMVNALNKYNILYCHMVEPRLIHTFDPVETPHSLEPMRKAFNGTFMVAGGYNRQDGINAIAENRADLVVYGRLFLANPDLPKRFALDAPLNKYHRETFYSSDPVLGYTDYPFLE

SEQ ID NO: 8914 - protein, 377 aa, Candida albicans SC5314
MSADGEFTRTQIFGTVFEITNRYTELNPVGMGAFGLVCSAVDRLTGQNVAVKKVMKPFSTSVLAKRTYRELKLLKHLKHENLITLDDIFISPLEDIYFVNELQGTDLHRLLNSRPLEKQFIQYFTYQIMRGLKYIHSAGVIHRDLKPSNILINENCDLKICDFGLARLQDPQMTGYVSTRYYRAPEIMLTWQKYDTEVDLWSVGCILAEMIEGKPLFPGKDHVHQFSIITELLGSPPADVIDTICSENTLRFVQSLPHRDPIPFSERFASCTHVEPEAIDLLAKLLVFDPKKRISAVEGLTHPYMEAYHDPTDEPVCESKFDWSFNDADLPVDTWRVMMYSEILDFHQTVGVANETEGSEQPDSQVEQNNLDSANGA

SEQ ID NO: 8915 - protein, 368 aa, Pisum sativum
MGIKKVEMSAADPIPLVTPYKMGNFNLSHRVVLAPLTRTRSYNNVPQPHAILYYSQRASQGGLLITEATGVSDTAQGYPNTPGIWTKEQVEAWKPIVDAVHAKGGVIICQIWHVGRVSNSCYQPNGQTPISSSDKSLTSSHAQQFTPPRRLSTDEIPDIVNDFRLAARNAIEAGFDGIEIHGAHGYLIEQFMKDEVNDRTDEYGGSIENRCRFALEVVEAAVNEIGADKVGIRLSPFAEHSECGDSSPKELGLYMVNALNKYNLLYCHMVEPRIKSAFEVVDNSPHSLVPMRKAFNGTFIVAGGYDRQDGINAVAENKTDLVVYGRLFLANPDLPKRFALDAPLNKYNRETFYTSDPVLGYTDYPFLD

SEQ ID NO: 8916 - protein, 206 aa, Lonchocarpus phaseolifolius
RVMAYKFHEDDHGRVIAEVKKPGLEPYLGLHYPATDIPQATRFLFMKNKVRMIVDCRAKHVKVLQDKKVPFDLTLCGSTLRAPHSCHLQYMENMNCSASLVMAVVVNDNEEDGDSDAVQPQKRKRLWGLVVCHNSIPRFVPFPLRYACEFLAQVFAIHVNKELELEYQIVEKNILRTQTLLCDMLMRDAPLGIVTQRPNIMDLVKC

SEQ ID NO: 8917 - protein, 2471 aa, Candida albicans SC5314
MSMNFFNSSEPARDHKPDQEKETVMTTEHYEFERPDVKAIRNFKFFRSDETETKKGPNLHISDLSPLESQSVPPSALSLNHSIIPDQYERRQDTPDPIHTPEISLSDYLYDQTLSPQGFDNSRENFNIHKTIASLFEDNSSVVSQESTDDTKTTLSSETCDSFSLNNASYLTNINFVQNHLQYLSQNVLGNRTSNSLPPSSSSQIDFDASNLTPDSIPGYILNKKLGSVHQSTDSVYNAIKIPQNEEYNCCTKASASQNPTNLNSKVIVRLSPNIFQNLSLSRFLNEWYILSGKHSSKEHQIWSNESLTNEYVQDKTIPTFDKESARFRPTLPINIPGILYPQEIINFCVNSHDYPLEHPSQSTDQKRFAMVYQDNDYKTFKELSMFTLHELQTRQGSYSSNESRRKSSSGFNIGVNATTTEAGSLESFSNLMQNHHLGATSTNGDPFHSKLAKFEYGVSKSPMKLIEILTDIMRVVETISVIHELGFVHNGLTSSNLLKSEKNVRDIKITGWGFAFSFTENCSQGYRNKHLAQVQDLIPYMAPEVLAITNSVVDYRSDFYSLGVIMYELVLGILPFKNSNPQKLIRMHTFENPIAPSALAPGWISEKLSGVIMKLLEKHPHNRYTDCHSLLHDLIEVKNMYISKLLDSGETIPNSNLNLSDRQYYLTKENLLHPEKMGITPVLGLKESFIGRRDFLQNVTEVYNNSKNGIDLLFISGESGRGKTIILQDLRAAAVLKQDFYYSWKFSFFGADTHVYRFLVEGVQKIITQILNSSEEIQNTWRDVILTHIPIDLSILFYLIPELKVLLGKKYTSIYKHKIGMGMLKRSFKEDQTSRLEIKLRQILKEFFKLVAKQGLSIFLDDVQWCSEESWRLLCDVLDFDSSGEVRESYNIKIVVCYALNADHLENVNIEHKKISFCQYAKQSHLNLREFSIPHIPLEDAIEFLCEPYTRSHDHECNSKKSDVIANLNCTNEYQQNTCKVIPSIIQELYQSSEGNVLLLIFLTRMTKLSGKVPFQRFSVKNSYLYDHLSNSNYGTTRKEILTNYLNMGTNSDTRALLKVAALISNGSGFFFSDLIVATDLPMAEAFQLLQICIHSRIIVPTSTYYKIPMDLIASDQTPFDLTDDNIWKLATLCSYKFYHDSICTHIIKELNASGEFKELSRLCGLRFYNTITKERLLNIGGYLQMATHFRNSYEVAGPEENEKYVEVLVQAGRYAISTYNMKLSQWFFNVVGELVYNLDSKTQLKSVLTIAENHFNSREFEQCLSVVENAQRKFGFDRLIFSIQIVRCKIELGDYDEAHRIAIECLKELGVPLDDDDEYTSENSLETCLGKIPLSVADIRGILKIKRCKNSRTLLMYQLISELIVLFKLQGKDKVRRFLTAYAMSQIHTQGSSPYCAVILIDFAQSFVNETTTSGMLKAKELSIVMLSLINRAPEISLSYVQSIYEYYFSCHAVFFESIEKMSDLIHPGNASSHCTRSSYYSSFHLIVNVSKIFFSCMNGESFKMFSTFKCKSYLTGDPQMPEMDNFLYDSEMLLAGHSELNEFMRKYQSFNQTSVGKFCYYLIVLLVMSREHRFDEAADLVLKVLEDLSEKLPVSFLHHQYYLICGKVFAYHQTKTPESEEQVERILARQFERYELWASTNKPTLLPRYLLLSTYKQIRENHVDKLEILDSFEEALQTAHKFHNVYDMCWINLECARWLISINQKRHRISRMVKQGLKILRSLELNNHLRLAEFEFDEYIEDEDHRNKWAGLTNNPTLDTVTTWQQQNMPDKVSPCNDKQLVHGKQFGKKEFDSHLLRLHFDGQYTGLDLNSAIRECLAISEALDENSILTKLMASAIKYSGATYGVIVTKKNQETPFLRTIGSQHNIHTLNNMPISDDICPAQLIRHVLHTGETVNKAHDHIGFANKFENEYFQTTDKKYSVVCLPLKSSLGLFGALYLEGSDGDFGHEDLFNERKCDLLQLFCTQAAVALGKERLLLQMELAKMAAEDATDEKASFLANMSHEIRTPFNSLLSFAIFLLDTKLDSTQREYVEAIQSSAMITLNIIDGILAFSKIEHGSFTLENAPFSLNDCIETAIQVSGETILNDQIELVFCNNCPEIEFVVGDLTRFRQIVINLVGNAIKFTTKGHVLISCDSRKITDDRFEINVSVEDSGIGISKKSQNKVFGAFSQVDGSARREYGGSGLGLAISKKLTELMGGTIRFESEEGIGTTFYVSVIMDAKEYSSPPFSLNKKCLIYSQHCLTAKSISNMLNYFGSTVKVTNQKSEFSTSVQANDIIFVDRGMEPDVSCKTKIIPIDPKPFKRNKLISILKEQPSLPTKVFGNNKSNLSKQYPLRILLAEDNLLNYKVCLKHLDKLGYKADHAKDGVVVLDKCKELLEKDEKYDVILMDIQMPRKDGITATRDLKTLFHTQKKESWLPVIVALTANVAGDDKKRCLEEGMFDFITKPILPDELRRILTKVGETVNM

SEQ ID NO: 8918 - protein, 554 aa, Shewanella sp. MR-4
MCSIFSILDIQSDAKELRQVALEMSKLMRHRGPDWSGIYASDKAILAHERLAIVDIEHGAQPLLTEDGSLILAVNGEIYNHKELKAQLGDKYSYQTNSDCEVILALYQEYGTEFLDKLNGIFAFVLYDKAKDAYLIGRDHMGIIPLYTGRDAAGNFYVASEMKALMPVCKTVAEFQPGQYLYSSIGEPVQYYTRDWQSFDAVKDNGASQEELRDALEAAVKRQLMSDVPYGVLLSGGLDSSVISAITQTFAKRRIEDDDQSGAWWPQLHSFAVGLKGAPDLAAAKKVADAIGTIHHEINFTFQEGLDAIKEVIYHLETYDVTTIRAATPMYLMARKIKAMGIKMVLSGEGADELFGGYLYFHKAPNAQAFHEELVRKLDKLHLFDCLRANKAMAAWGLEARVPFLDKEFMDVAMRINPEAKMSKDGRIEKHILRQAFEHKLPKEVAWRQKEQFSDGVGYSWIDGLKAHAAEQVDDLQLANAKFRFPYNTPETKEAYFYRCFFEEHYPLASAAETVPGGKSVACSTPEALAWDESLRGIIDPSGRAVRSVHAASY

SEQ ID NO: 8919 - protein, 210 aa, Pongamia pinnata
YDRVMAYKFHEDDHGEVIAEITKPGLEPYMGLHYPATDIPQAALFLFMKNKYRMIVDCHAKHVKVLQDEKLPFDLTLCGSTLRAPHSCHLQYMANMDSIASLVMAVVVNDNEEDGSSSDAVQPQKRKRLWGLVVCHNTTPRFVPFPLRYACEFLSQVFAIHVNKEIELEYQIIEKNILRTQTLLCDMLMRDAPLGIVSQSPNIMDLVKCD

SEQ ID NO: 8920 - protein, 119 aa, Cicer arietinum
LVNVMKSFENLNHWREEFLIQASPSDPENFPFVVLGNKIDVDGGNSRVISEKKAKAWCASKGNIPYFETSAKEGFNVEAAFQCIAKNALKNEPEEEMYLPDTIDVGSGGRQQRSTGCEC

SEQ ID NO: 8921 - protein, 446 aa, Corynebacterium diphtheriae NCTC 13129
MARSVVVWFRDDLRVHDNPALMKAWELVRANPADLHAVYIANEVGVRPLGGAVKWWLHHSLLALSEQLAQRGVRLHVLSGDPLTLLPQLVTSCGATAVTMNRRYDPAARSIDDAFVADASAHDVEVYDFPCHLLAEPGEITTTTGGSYKVFTPFSRNLRDAIGDLPLDTLAAPPKAEQPIDDTETQAAIADLGWDAWWAASISKAWTPGEPAAREALAELDDILPRYLDDRDRPDIDGTSRLSPRLRFGELSVAEVWNHAHTSEGFRRQLMWRDFAWHRLDAHPDMATANIRPEFDHFPWDGGDFEAELNAWRHGRTGIALVDAGMRELWATGTMHNRVRMVAASLLVKNLGIHWRHGEQWFWDTLVDADPASNPFNWQWVAGSGDDAAPYFRIFNPDTQARRFDPDGTYRTRWLPIMSADYPEEAIVDLKESRLRALDAYNACKR

SEQ ID NO: 8922 - protein, 681 aa, Mesorhizobium loti MAFF303099
MTSNDPLLQPYQLKHLTLKNRVMSTSHEPAYSEDGMPKQRYRLYHAEKAKGGMALTMTAGSAIVSRDSPAAFGNLHVYDDRIVPWLAELAEACHEHDCKVMIQITHLGRRTGWNKADWLPVLSASPVREPAHRAFPKTIEDWDIERIVADYASAAQRCQAAGLDGIEFEAYGHLMDGFWSPATNHRDDEYGGSLDNRLRFTNMVLDAVRAAVGEKFVVGIRMVADEDFSQGLSKEEGIEIARRLAGSGKVDFLNIIRGSIESDAALTKVIPVTGMRSSPHLDFAGEVRAATKFPTFHAARISDVATARHAIATGKLDMVGMTRAHIADPHIIRKVMEGREHEIRPCVGATYCLDRIYEGGEALCVHNAATGREAEIPHIIVKTEGPKRKVVVVGAGAGGLEAARVAAERGHQVTILEASSQAGGQVRLATQNPRRKELIGIIDWRLAELDRLGVEIRYDTWAEKDDILALAPDVVIVATGGLPQNPPLSAGDNLVTSSWDIMAGSVKPAENVLLFDDNGGHQGMGAAELIANAGSKLELVSPERFFAPEMGGMNHVPYMRAFQERGVTITINTRLRSVRREGNQLVAELASDFADGWRGERRVDQVVVEHGTAPLDDLYLSLKPLSKNGGAIDYERLVGGGDIFPVRNPEAGFVLLRIGDAVASRNIHAAIYDGIRFGLRI

SEQ ID NO: 8923 - protein, 402 aa, Arabidopsis thaliana
MATENLTDKNVVFRKLKSKSENKVCFDCSAKNPTWASVPYGIFLCIDCSAVHRSLGVHISFVRSTNLDSWSPEQLRTMMFGGNNRAQVFFKQHGWNDGGKIEAKYTSRAADMYRQTLAKEVAKAMAEETVLPSLSSVATSQPVESSENGFTSESPKESSLKQEAAVVSSPKASQKVVASTFKKPLVSRKSGKTGGLGARKLTTKSKDNLYEQKPEEPVPVIPAASPTNDTSAAGSSFASRFEYFDDEQSGGQSGTRVLSHVAPPKSSNFFNEFGMDSAFPKKSSSSSSKAQVEETDEARKKFSNAKSISSAQFFGNQNRDADLDSKATLQKFSGSAAISSSDLFGHGPDDSNIDITASDLINRISFQAQQDMSSIANLAEETKNKLGTFASSIFSDLQDRML

SEQ ID NO: 8924 - protein, 686 aa, Pseudomonas putida KT2440
MAFEAMFQPIQIGKLTIRNRVLSTAHAEVYATDGGMTTDRYVKYYEEKAKGGIGLAICGGSSVVAIDSPQEWWASVNLSTDRIIPHFQNLADAMHKHGAKIMIQITHMGRRSRWDGFNWPTLMSPSGIREPVHRATCKTIEVEEIWRVIGNYAQAARRAKEGGLDGVELSAVHQHMIDQFWSPRVNKRTDEWGGTFEGRMKFGLEVLKAVRAEVGDDFCVGMRICGDEFHPDGLSHEDMKQIAAYYDATGMLDFIGVVGSGCDTHNTLANVIPNMSYPPEPFLHLAAGIKEVVKVPVLHAQNIKDPNQATRILEGGYVDMVGMTRAHMADPHLIAKIKMGQIDQIKQCVGANYCIDRQYQGLDVLCIQNAATSREYMGVPHIIEKTTGVKRKVVVVGAGPAGMEAARVAAERGHDVTLFEKRDQIGGQITIAAKAPQRDQIAGITRWYQLELARLKVDLRLGTAADVAAIQDLRPDVIVLAVGGHSFLEQNEHWGAAEGLVVSSWDVLDGKVAPGKNVLVYDTICEFTGMSVADFIADKGSQVEIVTDDIKPGVAMGGTTFPTYYRSMYPKEVIMTGDMMLEKVYREGDKLVAVLENEYTGAKEERVVDQVVVENGVRPDEELYYALKEGSRNKGQIDVEALFAIKPQPILSQPGEGYLLYRIGDCVAQRNVHAAIYDALRLCKDF

SEQ ID NO: 8925 - protein, 362 aa, Pisum sativum
MGATTTDSVPLLTPYNMGKFKLSHRVVMAPLTRTRSYNNVPQPHAILYYSQRASQGGLLIAEATGVSDTAQGLPDTPGIWTKQQVEAWKPIVDAVHAKGAIFFCQIWHVGRVSNSSYQPNGQAPISSTDKAITSNDQQQFTAPRRLRTDEIPNIVNDFKLAARNAIEAGFDGVEIHGAHGYLLDQFMKDKVNDRTDEYGGSLENRCRFPLEVVEAVVNEIGAERVGIRLSPFAEFAESGDSNPNALGLYMANALNKYNILYCHMVEPRIIDTFDPVETPHSLEPMRKAFNGTFMVAGGYNRQDGIKAIAENRADLVVYGRWFISNPDLPKRFALNAPLNKYNRETFYSSEPVIGYTDYPFLE

SEQ ID NO: 8926 - protein, 394 aa, Pelargonium x hortorum
YFDGWKAYDRDPFHPSQNPNGVIQMGLAENQLSSDLIEDWVRSNPEASICTLEGVGKFKDVANFQDYHGLLEFRHAVAKFMSRGRGGKVTFDPHRVVMSAGATGANELIVFCLANPGDAFLLPSPYYPANDRDLQWRTGAQIIPVHCNSSNGFKITREALERSYAQAQESNINVKGVLLTNPSNPLGTILDRDTLKSIVSFVTDNNIHLVIDEIYAATVFVAPEFVSVSEILQEMDDTTCNPDLIHIVYSLSKDLGMPGFRVGIVYSFNDDVVSCARKMSSFGLVSTQTQHLLAAMLSDDVFVERFLAETRRRLGRRHGVFTKGLEELGIGCLKSNAGLYFWMDLRKLLEEETFEAEMVLWKVIINEVKLNVLLGSSFHCVGPGWFRVCFANMD

SEQ ID NO: 8927 - protein, 207 aa, Pongamiopsis amygdalina
RVMAYKFHEDDHGEVIAEVKKPGLEPYLGLHYPATDIPQATRFLFMKNKVRMIVDCRAKHVNVLQDKKVPFDLTLCGSTLRAPHSCHLQYMENMNCSASLVMAVVVNDNDEDGDSDAVQPQKRKRLWGLVVCHNTTPRFVPFPLRYACEFLAQVFAIHVNKEIELEYQIIEKNILRTQTLLCDMLMRDAPLGIVSQSPNIMDLVKCD

SEQ ID NO: 8928 - protein, 480 aa, Oryza sativa
MPSHQPVAGMQAIDPDYVKQPSSMASTSEPNRNPKYDPKKPHITDLPITRSNWYKHVNWLNVIFIIGMPLAGCIAAFWTPLQWKTAVWAVVYYFWTGLGITAGYHRLWAHKSYNASLPLRIFLAAVGAGAVEDSIRWRSRDHRAHHRYTDTNKDPYSVRKGLLYSHLGWMVMKQNPKRIGRTDITDLNEDPVVVWQHKNYIKSVVFMGLVSPTLVSGLFWGDWMGGYIYAGILRIFFVQQATFCVNSLAHWLGEQPFDDRNSPRDHVITALVTLGEGYHNFHHEFPSDYRNAIEWHQYDPTKWSIWLWSKLGLASNLKQFRSNEIEKGRVQQLQKKIDQKRAKLDWGVPLDQLPVIEWDDYVEQAKNGRGLIAVAGVVHDVTDFINEHPGGKTLIKSGIGKDATAMFNGGVYFHSNAGHNLLSTMRVGVIRGGCEVEIWKRAQRENKDVGLVKDNQGNPIIRAGNQITKVAQPIESASAA

SEQ ID NO: 8929 - protein, 362 aa, Pisum sativum
MGATTTDSVPLVTPYNMGKFKLSHRVVMAPLTRTRSYNNVPQPHAILYYSQRASQGGLLIAEATGVSDTAQGYPDTPGIWTKQQVEAWKPIVDAVHAKGSIFFCQIWHVGRVSNSIYQPNGQAPISSTDKSITSNDQQQFTAPRRLRTDEIPDIVNHFKLAARNAIEAGFDGVEIHGAHGYLLDQFMKDKVNDRTDEYGGSLENRCRFTLEVVEAVVNEIGAERVGIRLSPFAEFAESGDSNPNALGLYMVNALNKYNILYCHMVEPRLIQTFDPVETPHSLEPMRKAFNGTFMVAGGYNRQDGINAIDENRADLVVYGRLFISNPDLPKRFALNAPLNKYNRETFYSSDPVLGYTDYPFLE

SEQ ID NO: 8930 - protein, 145 aa, Pongamiopsis amygdalina
VMAYKFHEDDHGEVIAEITKPGLEPYLGLHYPATDIPQAARFLFMKNKVRMIVDCHAKHVKVLQDEKLPFDLTLCGSTLRAPHSCHLQYMANMDSIASLVMAVVVNDNEEDGDSCDAVQPQKRKRLWGLVVCHNTTPRFVPFPLR

SEQ ID NO: 8931 - protein, 326 aa, Catharanthus roseus
MDASALDGIINRLLEVRGRPGKQVQLSESEIRHLCLKSKEIFMEQPNLLELEAPVKICGDIHGQYSDLLRLFEYGGLPPNSNYLFLGDYVDRGKQSLETICLLLAYKIKYPENFFLLRGNHECASVNRIYGFYGECKRRFNVRLWKVFTDCFNCLPVAALIEEKILCMHGGLSPDLHSLDQIRNLPRPTDVPETGLLCDLLWSDPSKDVKGWGLNDRGVSYTFGPDKVKEFLQKHDLDLICRAHQVVEDGYEFFADRQLVTIFSAPNYCGEFDNAGAMMSVDETLMCSFQILNPAEKKAKFGFGSNTTVKTGTSPAKVKSFLGKVG

SEQ ID NO: 8932 - protein, 151 aa, Pongamiopsis amygdalina
RVMAYKFHEDDHGEVIAEVKKPGLEPYLGLHYPATDIPQAARFLFMKNKVRMIVDCRAKHVNVLQDKKVPFDLTLCGSTLRAPHSCHLQYMANMDSIASLVMAVVVNDNEEDGDSSDAVQPQKRKRLWGLVVCHNTTPRFVPFPLRYACEF

SEQ ID NO: 8933 - protein, 170 aa, Callerya megasperma
QATRFLFMKNKVRMIVDCRAKHVKVLQDKKFPFDLTFCGTTLRAPHSCHLQYMENMNAIASLVLAVVVNDNDGYEDSSDDVQPQKRKRLWGLVVCHHITPRFVPFPLRYACEFLAQVFAIHVSKEIELEYQIIEKNILRTQTLLCDMLMRDAPLGIVSQSPNIMDLVKCD

SEQ ID NO: 8934 - protein, 566 aa, Zea mays
MAPLLAAAMNHAAAHPGLRSHLVGPNNESFSRHHLPSSSPQSSKRRCNLSFTPRSARVGSQNGVQMLSPSEIPQRDWFPSDFTFGAATSAYQIEGAWNEDGKGESNWDHFCHNHPERILDGSNSDIGANSYHMYKTDVRLLKEMGMDAYRFSISWPRILPNGTKEGGINPDGIKYYRNLINLLLENGIEPYVTIFHWDVPQALEEKYGGFLDKSHKSIVEDYTYFAKVCFDNFGDKVKNWLTFNESQTFTSFSYGTGVFAPGRCSPGLDCAYPTGNSLVEPYTAGHNILLAHAEAVDLYNKHYKRDDTRIGLAFDVMGRVPYGTSFLDKQAEERSWDINLGWFLEPVVRGDYPFSMRSLARERLPFFKDEQKEKLAGSYNMLGLNYYTSRFSKNIDISPNYSPVLNTDDAYASQEVNGPDGKPIGPPMGNPWIYMYPEGLKDLLMIMKNKYGNPPIYITENGIGDVDTKETPLPMEDALNDYKRLDYIQRHIATLKESIDLGSNVQGYFAWSLLDNFEWFAGFTERYGIVYVDRNNNCTRYMKESAKWLKQFNAAKKPSKKILTPA

SEQ ID NO: 8935 - protein, 595 aa, Oryza sativa
PRITLYSLVTAVFSDPISLVRDHRLKEMMAAEGIIVQSFNADLLYEPWEVVDDEGQSFTMFAPFWNRCLSMPYDPAAPLLPPKRINSGDLSMCPSDDLIFEDDSERGSNALLARAWSPGWQNADKALTAFLNGPLIHYSVNRKKADSASTSLLSPYLHFGELSVRKVFHLVRMKQLVWSNEGNRAAEESCTLFLRSIGLREYSRYLSFNHPCSHEKPLLAHLRFFPWVINECYFKIWRQGRTGYPLVDAGMRELWATGWLHDRIRVVVSSFFVKVLQLPWRWGMKYFWDTLLDADLESDALGWQYISGSLPDGRELDRIDNPQLEGYKFDPHGEYVRRWLPELARLPTEWIHHPWDAPASVLQAAGVELGSNYPLPIVGLDAANARLQEALSEMWQLEAASRAAMDNGMEEGLGDSSEVPPIEFPRELQMEVDREPARVTANVLTTARRREDQMVPTMTSSLNRAETEISADFMNSVDSRAEVPTRVNFEPRTEREENFRTTAGNVARTNGIHEHNNFQQPQHRMRNVLAPSVSEASSGWTGREGGVVPVWSPPAASDHSETFASDEADISSRSYLDRHPQSHRLMNWSQLSQSL

SEQ ID NO: 8936 - protein, 474 aa, Campylobacter jejuni subsp. jejuni NCTC 11168
MKKLTNDFGNIIADNQNSLSAGAKGPLLMQDYLLLEKLAHQNRERIPERTVHAKGSGAYGEIKITADLSAYTKAKIFQKGEVTPLFLRFSTVAGEAGAADAERDVRGFAIKFYTKEGNWDLVGNNTPTFFIRDAYKFPDFIHTQKRDPRTHLRSNNAAWDFWSLCPESLHQVTILMSDRGIPASYRHMHGFGSHTYSFINDKNERFWVKFHFKTQQGIKNLTNQEAAELIAKDRESHQRDLYNAIENKDFPKWKVQVQILAEKDIEKLGFNPFDLTKIWPHSFVPLMDIGEMILNKNPQNYFNEVEQAAFSPSNIVPGIGFSPDKMLQARIFSYPDAQRYRIGTNYHLLPVNRAKSEVNTYNVAGAMNFDSYKNDAAYYEPNSYDNSPKEDKSYLEPDLVLEGVAQRYAPLDNDFYTQPRALFNLMNDDQKTQLFHNIAASMEGVDEKIITRALKHFEKISPDYAKGIKKALEK

SEQ ID NO: 8937 - protein, 96 aa, Ginkgo biloba
LDMPGLKSNDIKVQVENENVLNITGERRRDEKADADAKYIRMERRVGKFMRQFTLPSDANLEGISATCYDGVLTVTVPKIPPPEPKKPKTIEVIAS

SEQ ID NO: 8938 - protein, 275 aa, Bacillus cereus ATCC 10987
MHIPTTTLHNGVKMPMIGLGVYKAKEGDEVKQAVKTALEVGYRSIDTATVYENESGVGEAVRESGIPREEIFITTKVWNDDQGYEETLEAFEKSLKKLQMDYVDLYLIHWPIRGKYVDTYRALEKLYEEGKVRAIGVSNFHKHHLELLLPNCKVKPMVNQVELHPMLTQFELRNFCQGEQIQMEAWSPLMRGGEVFQHPIIQAIATKYEKTPAQVILRWDIQSGVVTIPKSVTPSRIQENFSIFDFSLTEEEMTQINTLNRNLHVGTNPDKYDTL

SEQ ID NO: 8939 - protein, 142 aa, Streptococcus thermophilus
MLNKIQQRNSDTYSMTPFDFFEDFSRNLFNDLRSNLIKTDIHETDNEYIVEAELPGISKDNIQVTYEDGVLTISGQQQIDTVDEDKKGKLIRSERSLTSVRRQYLLENVKEDEIKASYSDGILKVTLPKDSNKEIKKSIPIE

SEQ ID NO: 8940 - protein, 518 aa, Zea mays; identical to SEQ ID NO: 162

SEQ ID NO: 8941 - protein, 482 aa, Pelargonium x hortorum
MENKSKQLLSKIATNDGHGENSPYFDGWKAYDRDPFHPSQNPNGVIQMGLAENQLSSDLIEDWVRSNPEASICTLEGVGKFKDVANFQDYHGLLEFRHAVAKFMSRGRGGKVTFDPDRVVMSGGATGANELIVFCLANPGDAFLLPSPYYPANDRDLQWRTGAQIIPVHCNSSNGFKITREALERSYAQAQESNINVKGVLLTNPSNPLGTILDRDTLKSIVSFVTDNNIHLVIDEIYAATVFVAPEFVSVSEILQEMDDTTCNPDLIHIVYSLSKDLGMPGFRVGIVYSFNDDVVSCARKMSSFGLVSTQTQHLLAAMLSDDVFVERFLAERRRLGRRHGVFTKGLEELGIGCLKSNAGLYFWMDLRKLLEEETFEAEMVLWKVIINEVKLNVSPGSSFHCVEPGWFRVCFANMDDETVHVALKRIRAFVRKKEVGPVKRKRFMDNLNLRLSFSSLRYDESVMLSPHIMVSTHSPLVRART

SEQ ID NO: 8942 - protein, 447 aa, Wolinella succinogenes
MKSLIWFRRDLRLEDNRTFEQASGEVLPLFIFDSHLLSPLPKEDRRVGYIYGEVMRLKSELRARGLDLAIFYGEPLKILSRLKEQGFSRLFASQDYDSYALSRDEAARELLDCRFVLDNYLFDPNEVLKKEGSPYTIFSAYYNQSLKILSEGHYAKGLDLPKKLAPYPIPAPPSLESMGFSPLPLLESLKILPQKRLEEFSSKITRYALDRDSLEAEATSGLSLFLRFGTLGVREVIRRLKVWQEEGIKVAPFYRQILWREFYAMLLYHFPHSEREDFKPMQMRWSESQERLERWQKGECGVPLVDAGMRELNHTGFMHNRARMVCASFLTKNLHLHWSWGERYFASKLLDYDVAQNAGNWQWCAGSGADAQPFFRIFNPYTQSLKFDPKGEYVKRWIPELRGISTQNWSSEERWEGLKERYLAPIVSAKRSAQEAKAMQNTLRVSS

SEQ ID NO: 8943 - protein, 230 aa, Magnaporthe grisea 70-15
MASSSTPPTPLLYTILTECTTSASSQTSSLASLVLPKITHTSPQKLTYTHGAHHIHYIAEAPSDHGPHAASAGGLTFLVIADSSVGRSVPFGYLFEIRRRFLEEYPPGSTDFADQPNYGAASFNGELRRLMVEIGSTRQGRDDAVQNAQREIDDVRGIMTRNIEGLLERGERIDLLVDKTDRLGGSAREFRVRSRGLKRQMWWKNVKLMGLLGLVMFLILLTIIIAVKNS

SEQ ID NO: 8944 - protein, 171 aa, Callerya australis
PQATRFLFMRNKVRIIVDCRAKHVKVLQDKKIPFDLTFCGSTLRAPHSCHLQYMENMDASASLVLAVVDNDNDEYEDSSDDVQPQKRKRLWGLVVCHHISPRFVPFPLRYACEFLAQVFAIHVSKEIELDYQIIEKNILRTQTLLCDMLMRDAPLGIVSQSPNIMDLVKCD

SEQ ID NO: 8945 - protein, 484 aa, Proteus mirabilis
MEKKKLTTAAGAPVVDNNNVITAGPRGPMLLQDVWFLEKLAHFDREVIPERRZHAKGSGAFGTFTVTHDITKYTRAKIFSEVGKKTEMFARFSTVAGERGAADAERDIRGFALKFYTEEGNWDMVGNNTPVFYLRDPLKFPDLNHIVKRDPRTNMRNMAYKWDFFSHLPESLHQLTIDMSDRGLPLSYRFVHGFGSHTYSFINKDNERFWVKFHFRCQQGIKNLMDDEAEALVGKDRESSQRDLFEAIERGDYPRWKLQIQIMPEKEASTVPYNPFDLTKVWPHADYPLMDVGYFELNRNPDNYFSDVEQAAFSPANIVPGISFSPDKMLQGRLFSYGDAHRYRLGVNHHQIPVNAPKCPFHNYHRDGAMRVDGNSGNGITYEPNSGGVFQEQPDFKEPPLSIEGAADHWNHREDEDYFSQPRALYELLSDDEHQRMFARIAGELSQASKETQQRQIDLFTKVHPEYGAGVEKAIKVLEGKDAK

SEQ ID NO: 8946 - protein, 285 aa, Yersinia pestis KIM
MKTAKLFSPLKVGALTLPNRVFMAPLTRLRSIEPGDIPTPLMAEYYRQRASAGLIITEATQISFQAKGYAGAPGLHTQEQLNAWKKVTQGVHNEGGHIAVQLWHVGRISHNSLQPGQQAPVAPSAIAADTRTTVRDETGAWVRVPCSTPRALETEEIPGIINDFRQATANAREAGFDYIELHAAHGYLLHQFMSPASNQRTDQYGGSIENRTRLTLEVVDATAAEWGADRIGIRISPLGPFNGLDNGEDQEEAALYLIGPNAESGATDMTSFICRYCEPGRKPKM

SEQ ID NO: 8947 - protein, 245 aa, Zea mays
MAMLSTSWASSPISVSRTTRSPSLRDRYKALKDHRWELCTRFIDLKDASSGFETPGACYCSLVGDFNQCPQPKTVPGKEYNYVDDYDKGDNGVYAEEIMRRMKEEYWEPGEIRTCSCSWATSALPYAEGKQTYAVHWEPPPEEIYKWRFGRPKVKGSLRIYECHVGISGSEQKVSSFQEFTSKVLPHIKKAGYNAVQLTGVVLHKDYSSIGYKMNWLGYRFMMALMAVTSKEGKRTSRVSGHRDV

SEQ ID NO: 8948 - protein, 212 aa, Haemophilus influenzae R2846
MNIEIIPVTAFQQNCSLIWDDEKNAAIIDPGGEAERLIQRIEELDLNLKVILITHGHLDHVGAAMQLKQHFGVEIWGSNEKDKFLFESLPEQAQRFGLPNIDAFLPDRWFNQEGEILKLDGFNFEILHLPGHTPGHIGFIEHEKKVAFTGDVLFQGGIGRTDFPRGDYETLISSIRTKLLPLNDDIIIIAGHGSYTTIGQEKRSNPFLNPKS

SEQ ID NO: 8949 - protein, 160 aa, Millettia thonningii
KVRMIVDCHAKHVKVLQDEKLPFDLTLCGSTLRAPHSCHLQYMANMDSIASLVMAVVVNDNEEDGESSDAVQPQKRKRLWGLVVCHNTTPRFVPFPLRYACEFLAQVFAIHVNKEIELEFQIIEKNILRTQTLLCDMLMRDAPLGIVSQSPNIMDLVKCD

SEQ ID NO: 8950 - protein, 822 aa, Arabidopsis thaliana
MGLIKNTVHYCCVSRDNQILYSYNGGDQTNESLAALCLEKSPPFHTWYFETIGKRRFGFLIGDGFVYFAIVDEVLKRSSVLKFLEHLRDEFKKAARENSRGSFTAMIGSINVEDQLVPVVTRLIASLERVAESSSNNELKSSNLGEQSEGSNSTKAPLLGRLSKQEKKKGKDHVIELEEHRKSNDRGNITDDSAGAGTSLEKECVSSSGRSVTQSFEWKWRRPINRLRETNLPKEKNQQNQNKATVSLSLSLSLTSSPPFSPLKPDQKPSFIRALLGQQMFTSGNVTARVFERQIRTPPPGASVNRARHFYENLVPSYTLYDVESPDHCFRKFTEDGLFLISFSRNHQELIVYRPSWLTYSTTDDSTTTLPPLPRRASKFDSFFTQLYSVNLASSNELICKDFFLYHQTRRFGLFATSTAQIHDSSSPSNDAVPGVPSIDKITFVLLRLDDGVVLDERVFLHDFVNLAHNMGVFLYDDLLAILSLRYQRIHLLQIRDSGHLVDARAIGYFCREDDELFLNSSSQAMMSQDKSKQQSLSGSKEDDTGENGLRHSLSQPSGSNSFLSGVKQRLLSFIFREIWNEESDNVMRVQSLKKKFYFHFQDYVDLIIWKVQFLDRQHLLIKFGSVDGGVTRSADHHPAFFAVYNMETTDIVAFYQNSAEDLYQLFEQFSDHFTVSSSTPFMNFVTSHSNNVYALEQLKYTKNKSNSFSQFVKKMLLSLPFSCQSQSPSPYFDQSLFRFDEKLISAADRHRQSSDNPIKFISRRQPQTLKFKIKPGPECGTADGRSKKICSFLFHPHLPLAISIQQTLFMPPSVVNIHFRR

SEQ ID NO: 8951 - protein, 280 aa, Crocosphaera watsonii WH 8501
MSKSPTLLSPCQVGNITLKNRVVMAPLTRSRAGEERMPNDLMKQYYSQRKSAGLIISEATVISPQGCGWLNSPGIYSDAQMKAWQPITQALHETETPIFLQLWHCGRASHSSFQENNQLPVSASAVKPNGDYIHTPIGKQSYKTPRALETEEIPPIVEDYRLAAERAKDAGFDGVEIHAANGYLIDQFLQSKTNQRTDKYGGSIENRYRFLKEIIEAVLTVFSAGQIGVRLSPNGVFNDMGCPEYRELFIYVAQQLNSYNLAYLHLLDGLGFGFHELGVQ

SEQ ID NO: 8952 - protein, 276 aa, Ralstonia solanacearum
MTDTQPAVTLGDGARMPQLGLGLWRTPAGETAGLVRTAIEAGYRLVDTAAAYGNERGVGEGVRAAGAEPAVFVTTKLWNEDQGYDRTLRAFDESLRCLGLPAIDLYLIHWPAPSRGRYVESWRALIRLRDEGRARSIGVSNFGAEHLARIIDETGEAPAVNQIELHPWFQQRALRAFHARHGVRTESWSPLGQGGLLHDLTVREIAARHGKTPAQVVIRWHLDNGLIVIPKSAHPDRIRENIAVFDFCLTPADQAAIAGLDRADGRIGPDPVAAGF

SEQ ID NO: 8953 - protein, 220 aa, Eucalyptus gunnii
MNPFSSHSHPNSCRFNFAEPPSDSRSATALGNFSHKEVLLASHHPKKRAGRKKFRETRHPVYRGVRLRDSGKWVCEVREPIKKSRIWLGTFPTVEMAARAHDVAALALRGRSACLNFADSAWRLPVPASADTKEIQKAAARAAEAFQSVESEDVMSGDEKKLRSEEGVFYDEEDIFGMPGLLADMAEGMLLSPPKWGGDIYGGEDEGNLGAHTSLWSYSI

SEQ ID NO: 8954 - protein, 531 aa, Streptococcus ratti
MAKDIKFSADARSAMVRGVDTLADTVKVTLGPKGRNVVLEKSFGSPLITNDGVTIAKEIELEDHFENMGAKLVSEVASKTNDIAGDGTTTATVLTQAIVREGLKNVTAGANPIGIRRGIETAVATAVDGLKAIAQPVSGKEAIAQVAAVSSRSEKVGEYISEAMEKVGNDGVITIEESRGMETELDVVEGMQFDRGYLSQYMVTDNEKMVADLENPYILITDKKISNIQDILPLLEEVLKTNRPLLIIADDVDGEALPTLVLNKIRGTFNVVAVKAPGFGDRRKAMLEDIAILTGGTVITEDLGLELKNATMDALGQAARVTIDKDTTVIVEGSGSKEAIENRVALIKSQIETTTSDFDREKLQERLAKLSGGVAVIKVGAATETELKEMKLRIEDALNATRAAVEEGIVSGGGTALINVIEKVAALDLEDDAATGRNIVLRALEEPVRQIAKNAGYEGSVVIDKLKNSPVGTGFNAANGEWVDMIKEGIIDPVKVTRSALQNAASVASLILTTEAVVADHPAPEAPAAPA

SEQ ID NO: 8955 - protein, 423 aa, Candida albicans SC5314
MMNIDQHHQLQQQHQQQMLQQQAQAQAQAQAQAQQQQQQQQQAAAAAAAANAAATTSSSSPRQVSFNVSDHYQILEIVGEGAYGIVCSAIHKPSQQKVAIKKIEPFERSMLCLRTLRELKLLKHFNHENIISILAIQRPINYESFNEIYLIQELMETDLHRVIRTQNLSDDHIQYFIYQTLRALKAMHSANVLHRDLKPSNLLLNSNCDLKICDFGLARSIASQEDNYGFMTEYVATRWYRAPEIMLTFQEYTTAIDVWSVGCILAEMLSGRPLFPGRDYHNQLWLIMEVLGTPNMEDYYNIKSKRAREYIRSLPFCKKIPFSELFANTNNNTSTSTSNTGGRTNINPLALDLLEKLLIFNPAKRITVEDALKHPYLQLYHDPNDEPISDKIPEDFFDFDKMKDQLTIEDLKKLLYEEIMKPL

SEQ ID NO: 8956 - protein, 224 aa, Eucalyptus gunnii
MNSSSYISHPNSFSFDFAEPPFSLLLSHDRSAAPGNFSGEEVRLASDHPKKPAGRKKFRETRHPVYRGVRLRDSGKWVCEVREPRKKSRIWLGTFPTADMAARAHDVAALALRGQSACLNFADSAWRLPVPASPNTKDIQKAAAKAAEAFQLVESEDVMSGNEKKLHSEEGVLYDEEDIFGMPGLLANMAEGMLLSPPECSGDIYAGLDDGNLDAYTSLWSYSM

SEQ ID NO: 8957 - protein, 461 aa, uncultured epsilon proteobacterium
MLFKQLFTIISSIKIKHGYIMKNKKFITLGFASASIAIALLFSTNVFASSANSEATKEASRLQSLAKFTKVISIVEQYNVDDITIEELMDKALEGMLSNLDAHSNYLKQKDYKQLKVQTDGEFGGLGITVGVRDGALTVIAPIEGTPADKAGLQSADIILKINDESTLNMTIDEAVAIMRGKVGEPIDLMIVREGELKPLTIHIVRGIITIQSVYAKTIEDDILYIRVTSFDKKVAEDVTKEIKKRKATTKGIILDLRNNPGGLLDQAVDLVDIFVDKGDIVSQKGRKEADAKTYTASKNKTVTNVPLVVLINGGSASASEIVSGSLQDHKRAILLGQNTFGKGSVQVVLPITEDEAIKLTIARYYLPSGRTIQAVGVKPDIEVFPGEVNTKKNAFSIKESDLKKHLEEELVKVDGNETIKEEKEALEEAKKGIITPEMMNKDIQLKEGVDIIKALIIIKG

SEQ ID NO: 8958 - protein, 525 aa, Streptococcus sobrinus
MAKDIKFSADARSAMVRGVDVLADTVKVTLGPKGRNVVLEKSFGSPLITNDGVTIAKEIELEDHFENMGAKLVSEVASKTNDIAGDGTTTATVLTQAIVREGLKNVTAGANPIGIRRGIERAVSTAVDELKAIAQPVANKEAIAQVAAVSSRSEKVGEYISEAMEKVGNDGVITIEESRGMATELDVVEGMQFDRGYLSQYMVTDNEKMVADLDNPYILITDKKISNIQDVLPLLEEVLKTSRPLLIIADDVDGEALPTLVLNKIRGTFNVVAVKAPGFGDRRKAMLEDIAILTGGTVITEDLGLELKDASIASLGQAAKITIDKDSTVIVEGAGSADAIAERVAVIKSQLESTTSEFDREKLQERLAKLSGGVAVIKVGAATETELKEMKLRIEDALNATRAAVEEGIVAGGGTALVNVIEKVTALDLAGDQATGRNIVLRALEEPVRQIARNAGYEGSVIIEKLKASKSGTGFNAADGSWVDMVEAGIIDPVKVSRSALQNAASVASLILTTEAVVADHPEEN

SEQ ID NO: 8959 - protein, 528 aa, Streptococcus mutans
MAKDIKFSADARSSMVRGVDILADTVKVTLGPKGRNVVLEKSFGSPLITNDGVTIAKEIELEDHFENMGAKLVSEVASKTNDIAGDGTTTATVLTQAIVREGLKNVTAGANPIGIRRGIETAVATAVDELKAIAQPVSGKEAIAQVAAVSSRSEKVGEYVSEAMEKVGNDGVITIEESRGMETELDVVEGMQFDRGYLSQYMVTDNEKMVADLENPYLLITDKKISNIQDVLPLLEEVLKTNRPLLIIADDVDGEALPTLVLNKIRGTFNVVAVKAPGFGDRRKAMLEDIAVLTGGTVITEDLGLELKDTTIDALGQAARVTVDKDSTVIVEGSGGKEAVANRVNLIKSQIETATSDFDREKLQERLAKLSGGVAVIKVGAATETELKEMKLRIEDALNATRAAVEEGIVAGGGTALINVIEKVAALDLTDDAATGRNLVLRALEEPVRQIAKNAGYEGSVIIDKLKNSSAGTGFNAANGEWVDMIDAGIIDPVKVTRSALQNAASVASLILTTEAVVADHPAPEAPA

SEQ ID NO: 8960 - protein, 507 aa, Candida glabrata CBS138
MSANPTNTSDVRGDRVVTNSTGYPYNDPFATQRVGQHGPLLMQDANLIDSLAHFNRERIPERNPHAHGSGAFGYFEVTDDITDICGSAMFSEIGKRTRFLTRFSTVGGEKGSADTARDPRGFATKFYTEEGNLDWVYNNTPIFFIRDPSKFPHFIHTQKRNPQTNLKDPNMFWDYLTTPENQVAVHQLMILFSDRGTPASYRHMNGYSGHTYKWSNKKGEWHYVQVHILTDQGIKNLTNDEAVEIAGKNPDYCQQDLYENIAKGNYPSWTVYIQTMTEEQAKKLPFSVFDLTKVWPHKDFPLRRVGKMVMNENPLNYFASIEQAAFSPANTVPYQEPSADPVLQSRLFAYADAHRYRLGANFHQIPVNCPYASKFFNPVIRDGPMNVDGNFGNEPNYYASNKQYQIPNQDRPIQQHQEVWNGPAQPFHWATSPGDIDFVQARDLYKVLGKQKDQQEHLAYNIGTHVAGADPEIQQRVIDMFSRVDEGLGANIRKEIEKNASAPTAKI

SEQ ID NO: 8961 - protein, 452 aa, Streptomyces avermitilis MA-4680
MTIDLAALPHDFLWGTATAAYQIEGAVAEDGRSPSIWDTFSHTPGKIDNNDHGDVACDHYHRWREDIGLMKQLGTNAYRLSVAWPRVIPGGDGPVNAKGLAFYDELVDGLLEAGITPSVTLYHWDLPQVLQDRGGWPERATAEHFAAYAAVVAERLGDRVTHWATLNEPLCSAWIGHLEGKMAPGLTDLTAAIRASYHLLLGHGLAAQAIRAAAPAAEVGIVNNLSTIHAASDRPEDVAAARRMDGHVNRWWLDPVHGRGFPADMREVYGVELPEQPGDLATIAAPLDWLGLNYYFPATVADDPTGPAPRVRSVRRLGVPRTGMDWEIDATGIETLLLRLTHEYGPRKLYVTENGSAFPDVVRPDGTVDDPERQDYLVRHLAACASAARKGAPLAGYFAWSLLDNFEWAYGYDKRFGLVHVDYRTQVRTIKGTGHRYADIVRTHRGRARRAA

SEQ ID NO: 8962 - protein, 422 aa, Pseudomonas syringae pv. phaseolicola 1448A
MTGFLWNVSDNARVTFFFMSIFTRAKQPMCYNGLLDLSVWQVIAVTLAMTHVTIVGVTVYLHRYSAHRSLELNAGLKHFFRFWLWLTTAQNTREWTAIHRKHHAKCETVDDPHSPVVKGLSTVLRKGAELYREEAQNQDTLRIYGKNCPEDWIERNLYSRYKLLGIALMAVIDVALFGALGITVWAVQMMWIPFWAAGVVNGLGHAVGYRNFECRDAATNLVPWGIVIGGEELHNNHHTYPNSAKLSVKPWEFDMGWAWIKLFSFLGLAKVQRVAPIAHRVEGKGHMDMDTAMAILNNRFQIMGQYRKLVIAPLVAQELAKADESVRHQFSRAKRLLSRETSLLDDKHHLRIQTMLEHSHALKVIYEKRLALQQIWVKTSSNGHDMLSAIKEWIHEAEASGIHSLREFADQLKTYSLRPAHA

SEQ ID NO: 8963 - protein, 400 aa, Candida glabrata CBS138
MSFTTDFEPVSLKGTNLFKPLKVGNNTVLHRAAFPPLTRMRAESPGNIPNREWSVEYYRQRSQRPGTLVITEGTFPSAQAGGYDNAPGIWSEEQLVEWRKIIDAIHSNKSFAWVQLWALGRLAMPNLLARDGLRFDSATDNYYASPEQEELAKKSNNLQHGLSREDIKQYVNDYVQASKNAISAGADGVEIHSSTGFLLNEFIDPISNHRSDEYGGSIENRARFVLEVVDAVVDAIGAEKTAIRFSPYGNYGGMSGGTDPTIIAQYAYIIGELEKRAKGGKRLAYIHFMEPRVLDPFLPEGESVYNEGTIDFAYSIWKGVIIRTGNYAIHPEVVKDVVNDDRTIIGYGRYFISNPDLVDRLEKGLPLNKYDRSYFYTMTAEGYIDYPTYAEAIKKGWDKK

SEQ ID NO: 8964 - protein, 492 aa, Homogyne alpina
MDPYKQRPASAYNSPFLTTNAGLPVYNNTASLTVGNRGPILLEDYHLIEKLANFTRERIPERIVHARGASAKGFFEVTHDITHLTCADFLRAPGVQTPTIVRFSTVIHERGSPETIRDPRGFATKFYTREGNFDIVGNNFPVFFTRDAMAFPDVIHAFKPNPKSHIQEDWRILDFLSHHPESLNTMTFWLDDIGIPTDYRHMEGSSVNALTLVNKEGKMHYVKFTWKPTCGVKCLMDEEAIKIGGANHSHATQDLYDSIQAGNFPEWKLFLQVIDPDHEDRLDFDPLDGTMTWPDDIIPLQPVGRMVLNKNIDNFFAENEQLALNPGLVVPGIYYSDDKMLQGRIFAYSDTQRHRLGPNYLQLPVNAPKCAHRNNHYDGNMNFMHRDEEVDYFPSRYDRVQHAQKYPISPAKVTGTRDRTVIPKANDFKQPGERYRSWEPDRQERFIIRMVKMLSDPRVTHELRSIWISYWTQADQSLGQKIASRLNVRPNY

SEQ ID NO: 8965 - protein, 470 aa, Staphylococcus aureus subsp. aureus MSSA476
MTKTLPEDFIFGGATAAYQAEGATNTDGKGRVAWDTYLEENYWYTAEPASDFYNRYPVDLELSEKFGVNGIRISIAWSRIFPNGYGEVNPKGVEYYHKLFAECHKRHVEPFVTLHHFDTPEVLHKDGDFLNRKTIDYFVDYAEYCFKEFPEVKYWTTFNEIGPIGDGQYLVGKFPPGIKYDFEKVFQSHHNMMVAHARAVKLFKDGGYQGEIGVVHALPTKYPFDPSNPEDVRAAELEDIIHNKFILDATYLGKYSRETMEGVQHILSVNGGKLNITDEDYAILDAAKDLNDFLGINYYMSDWMRGYDGESEITHNATGDKGGSKYQLKGVGQREFDVDVPRTDWDWMIYPQGLYDQIMRVVKDYPNYHKIYITENGLGYKDEFIESEKTVHDDARIDYVRQHLNVIADAIKDGANVKGYFIWSLMDVFSWSNGYEKRYGLFYVDFETQERYPKKSAYWYKELAETKEIK

SEQ ID NO: 8966 - protein, 439 aa, Thermus thermophilus HB8
MKRRAWFMVGLGALLALVYAQLPRPQAETFLQNPNGQALLEVYQRIQQDYLEPLSKEKLDKLLEGAIGGMVQALEDPFTSYSPPQRSTLRQEDLRGEFFGIGATLSAANPDGTGARIEGVMKGLPAQRAGLRAGDVILEVDGEDVTKLPLLDIVAKIRGREGTKVTLKVRREGVPAPLVFELVRERVEIISVSTAKVGDVGYVALETFANFKVEDQLKRAIEELKAQGVKKLIFDLRDNGGGLLDQGCAVASAFLKEGPIVYTRTKNLTRVWCEATGQTLWDGPMVVLVNGNSASASEIVAGALQDYGRAKVIGEKTFGKGVGQTPYTLANGGELTLVTFEWLTPKRRSINKEGITPDIVVKDTRFPTPFSLQGAGAPPGAEIAVTLNGKTVKVKADAEGKFSYAEPQRQRPLPEDRGQAVLDLENDAILKRALEELNR

SEQ ID NO: 8967 - protein, 218 aa, Triticum aestivum
  misc_feature (108)..(108): Xaa can be any naturally occurring amino acid
  misc_feature (132)..(132): Xaa can be any naturally occurring amino acid
MMGRKALDYEELNENVKKVQYAVRGELYLRASELQKEGKRIIFTNVGNPHALGQKPLTFPRQVVALCQAPFLLDDPNVGLIFPADAIARAKHYLSLAPGGLSAYSDSXRYPGVRQEVAEFIQRRDGYPSDPXLIYLLMVPQRCDQMLNAIIRNKRTGFCPWSTIPVYSAAISFGGSLVPIFEKKLLGLILQSRNWKTRQGNTVHDINQKPSGKAKEKK

SEQ ID NO: 8968 - protein, 162 aa, Frankia sp. CcI3
MAFPVRSSQRPAPVIRWDPFREIEDAWTRMGSLLDEVVGGAEGRPVGLLAAAVIPVDIEETDDAYIVELELPGVRGRDVSIDLQDNELRVTGEIKERERKGVLRRQTRRVGRFEHRIVLPGEVDPESVSASLDDGVLTIRLAKSRKSQPRHIEVTGGSGGGS

SEQ ID NO: 8969 - protein, 484 aa, Oryza sativa (japonica cultivar-group)
MAAPSVAVDNLNPKVVLNCEYAVRGEIVIHAQRLQQQLQTQPGSLPFDEILYCNIGNPQSLGQKPVTFFREVIALCDHPCLLEKEETKSLFSADAISRATTILASIPGRATGAYSHSQGIKGLRDAIAAGIASRDGYPANADDIFLTDGASPGVHMMMQLLIRNEKDGILCPIPQYPLYSASIALHGGALVPYYLNESTGWGLEISDLKKQLEDSRLKGIDVRALVVINPGNPTGQVLAEENQRDIVKFCKNEGLVLLADEVYQENIYVDNKKFNSFKKIARSMGYNEDDLPLVSFQSVSKGYYGECGKRGGYMEITGFSAPVREQIYKVASVNLCSNITGQILASLVMNPPKAGDASYASYKAEKDGILQSLARRAKALENAFNSLEGITCNKTEGAMYLFPQLSLPQKAIDAAKAANKAPDAFYALRLLEATGIVVVPGSGFGQVPGTWHIRCTILPQEEKIPAIISRFKAFHEGFMAAYRD

SEQ ID NO: 8970 - protein, 429 aa, Zea mays
MAKSKSSAKAGPPLLGKYELGHLLGRGNFAKVYHARCLGGGDPVAVKVLDKAGLAATGMASRLLREVSAMRRLSHPNVLRLHEVLATRSKVYLVMELAPGGDLLSRLASLPSRRLPEHAARRVFLQLASALIYSHARGVFHRDVKPQNVLLDAEGNLKVSDFGLAALPDSVRDDGRLHTACGTPAFAAPEVLRRRAYDGAKADAWSCGVILFVLLAGHLPFDDANIADMCRRAHRREYTVPRWVSQPARRLVARLLDPNPATRLAVAELAGHPWFKRSLSVDSQLGGLLDGQAERELAFQAPPALNAFDIISMSPGLDLSGLFGEGRRRREKRFMTTASPERAVERLAQAGARLGYFIVGKKGAERLPLGVLPGLVAMSMEMSEVSPELMLVELRLEGGHGDEDEAFGWEELRVELGDVVTAWHVSEEG

SEQ ID NO: 8971 - protein, 316 aa, Glycine max
MSDAKERSGFCVWPDARQLCLRKGLLYGFMRLFSIPLKTLRGASRSLRVDQFCSVVNLSSSLQIELVPCLRDNYAYLLHDVDTGTVGVVDPSEAAPIIDALSKKDLNLTYILNTNHHPDHTGGNAELKERYGAKVIGSEIDKERIPGIDIYLSDGDNWMFAGHEVHILATPGHTEAGHVSFYFPGSGAIFTGDTLFSLSCGKLLEGTPEQMLSSLKRIMSLPDDTSIYCGHEYTLNNSKFALSIEPENKELQSYATHVSNLRNKGLPTIPTTLKVEKACNPFLRTWSIEIRQKLNIAATADDAEALGVIRQAKDNF

SEQ ID NO: 8972 - protein, 206 aa, Mundulea sericea
MAYKFHEDDHGEVIAEITKPGLEPYLGLHYPATDIPQASRFLFMKNKVRMIVDCHAKHVKVLQDEKLPFDLTLCGSTLRAPHSCHLQYMANMDSIASLVMAVVVNDNEEDGDSSDAVQPQKRKRLWGLVVCHNTSPRFVPFPLRYACEFLAQVFAIHVNKEIELENQIIEKNILRTQTLLCDMLMRDAPLGIVSQSPNIMDLVKCD

SEQ ID NO: 8973 - protein, 349 aa, Pseudomonas fluorescens PfO-1
MATIFDPIKLGDLELSNRIIMAPLTRCRADEGRVPNALMAEYYVQRASAGLILSEATSVTPMGVGYPDTPGIWSNDQVRGWTNVTKAVHAAGGKIVLQLWHVGRISHPSYLNGETPVAPSAIQPKGHVSLVRPLADYPTPRALETAEIADIVDAYRVGAENAKAAGFDGVEIHGANGYLLDQFLQSSTNQRTDNYGGSLENRARLLLEVTDAAIEVWGAGRVGVHLAPRADSHDMGDDNLAETFTYVARELGKRGIAFICSREKEGADSLGPQLKEAFGGAYIANERFTKDSANAWLAEGKADAVAFGIPFIANPDLPARLKADAPLNEPHPETFYGKGAVGYLDYPTL

SEQ ID NO: 8974 - protein, 413 aa, Crocosphaera watsonii WH 8501
MRKRAFWVTLLVIFSLLFNCFAWTPNADAFTENQKLLLQSWRLVNQSYLDDTFNHQNWWLLRQDLLKRSLDNREETYDTIEEMLATLDEPFTRLLRPEQYHNLQVSTAGQLSGVGLQININPDTGNLEVVSPIEGSPADAAGIKARDRILKIDDVDTTTLTLDEAATRMRGPRGTKVYLTILPHKETSDIREVEITRNRISLSPVTASLNQPTPNLPIGYIRLNQFSANAAEEMANAINNLEKEGAEGYILDLRNNPGGLLQAGIEIARLWMDQGTIVYTVNRQGVQDSFSALGTALTDDPLVLLVNQGTASASEILAGALKDNRRATLVGEKTFGKGLIQSLFELPDGAGLAVTVAKYETPNHNDIHKLGIEPDKVVNQEPISYRQIATKDDVQYEAAVELLTGNSVLANAG

SEQ ID NO: 8975 - protein, 526 aa, Streptococcus mutans
MAKDIKFSADARSSMVRGVDILADTVKVTLGPKGRNVVLEKSFGSPLITNDGVTIAKEIELEDHFENMGAKLVSEVASKTNDIAGDGTTTATVLTQAIVREGLKNVTAGANPIGIRRGIETAVATAVDELKAIAQPVSGKEAIAQVAAVSSRSEKVGEYVSEAMEKVGNDGVITIEESRGMETELDVVEGMQFDRGYLSQYMVTDNEKMVADLENPYLLITDKKISNIQDVLPLLEEVLKTNRPLLIIADDVDGEALPTLVLNKIRGTFNVVAVKAPGFGDRRKAMLEDIAVLTGGTVITEDLGLELKDTTIDALGQAARVTVDKDSTVIVEGSGGKEAVANRVNLIKSQIETATSDFDREKLQERLAKLSGGVAVIKVGAATETELKEMKLRIEDALNATRAAVEEGIVAGGGTALINVIEKVAALDLTDDAATGRNLVLRALEEPVRQIAKNAGYEGSVIIDKLKNSSAGTGFNAANGEWVDMIDAGIIDPVKVTRSALQNAASVASLILTTEAVVADHPAPEA

SEQ ID NO: 8976 - protein, 283 aa, Oenococcus oeni PSU-1
MVLSRSVPNIVLNDGHSLPAIGLGTYLVRGGQGVDQILSAIEDGYRLIDTSTNYDSEGAVGEAIRRSGIPRSEFIVTSKLPGKYHHYQDALMMIQESIFRMGIDYLDLYLIHWPLPKRDHYVEAWKALVDAQKLGLIRSIGVSNFLPEHLDRIINESGVTPAVNQIEVHPYWVQEDMLAANKSRGIVSEAWSPLGRGSAALKEDIIKNLADKYGKNTGQIILRWHTQRGIIPLPKASSLIHQRSNIDIFDFSLTSSEIEQINALNRSDGRVDGQDPNTYEEFD

SEQ ID NO: 8977 - protein, 162 aa, Oryza sativa
  misc_feature (44)..(44): Xaa can be any naturally occurring amino acid
MSLIRRSNVFDPFSLDLWDPFDGFPFGSGGSSSGSIFPCVPARXASSETAAFAGARIDWKETPEAHVFKADVPGLKKEEVKVEVDDGNILQISGERNKEQEEKTDQWHRVERSSGKFLRRFRLPDNAKPEQIKASMENGVLTVTVPKEEAKKPDVKSIQISG

SEQ ID NO: 8978 - protein, 525 aa, Streptococcus sobrinus
MAKDIKFSADARSAMVRGVDVLADTVKVTLGPKGRNVVLEKSFGSPLITNDGVTIAKEIELEDHFENMGAKLVSEVASKTNDIAGDGTTTATVLTQAIVREGLKNVTAGANPIGIRRGIERAVSTAVDELKAIAQPVANKEAIAQVAAVSSRSEKVGEYISEAMEKVGNDGVITIEESRGMATELDVVEGMQFDRGYLSQYMVTDNEKMVADLDNPYILITDKKISNIQDVLPLLEEVLKTSRPLLIIADDVDGEALPTLVLNKIRGTFNVVAVKAPGFGDRRKAMLEDIAILTGGTVITEDLGLELKNASIASLGQAAKITIDKDSTVIVEGAGSADAIAERVAVIKSQLESTTSEFDREKLQERLAKLSGGVAVIKVGAATETELKEMKLRIEDALNATRAAVEEGIVAGGGTALVNVIEKVTALDLAGDQATGRNIVLRALEEPVRQIARNAGYEGSVIIEKLKASKSGTGFNAADGSWVDMVEAGIIDPVKVSRSALQNAASVASLILTTEAVVADHPEEN

SEQ ID NO: 8979 - protein, 942 aa, Rhodopirellula baltica SH 1
MNSTIASNPTSSRIVSITSLPPKVLATDLDGTFLPLDGDDAAVASMKQIREQLEAIDVPLVFVTGRHFDSVRDAIGEFNLPKPQWILCDVGVSIYKADGEGGYIRESAYEQILDEVLGDIDIQKHRLAIGELENFTLQESYKQGRHKWSYYVPADQLEACHQAVEAYLKLHELPCSIVSSIDPFNNDGLVDVLPHGASKAFALHWWCDQHELQPEQIVFCGDSGNDTAALIAGYRSVVVGNADRKIARKVADAHQAAGWVDRLKLARGTSTSGVLEGARWFGLFENSIEETSIEATSPLNATDLPESIPWGARLIGANRAEFTLWAPKQKQVVLELMPDRLVRMQREDRGFHRCIVDGVVDGTRYQYRFVRDEHVAAFADPNTELSVDMLLHALPDPASRYQPEGVHGPSSIVDAQFPFQATADSAADELDELIIYEMHLGTFTEQGTYLSAIERLDELVDLGITAIELMPIAACAGHWNWGYDGTHWFAPMTAFGSPNEFRQFVDAAHIRGLLVMVDVVYNHFGSEGNYWTEFGPYTSRKHNTVWGAAPNFDDPKRGDLVRRFVIDNAIMWLKEYNLDGFRVDAIHCMKDDSAKHITTQMSEEIRRWSDKAGRRVWLIAETNVYDAAMVKPLSEGGTGFDAQWSDDFVHSMFATVRPGEQLTQRIYSPGSDLEQTLRRGFVFAGDVRGDRGREAEPTLDTDGMLKRIDTRSSIVCIQNHDFIGNHPTGMRLHQLTSPETQAAAVTLAMLLPSIPMLFMGEEFASPNPFRFFVDFGDPRLQRAVVRGRKREYPQHDWSDGVLPTDEEAMRSSVIGSVELGSETMRNWYKTLISIRKQFVGSGLLSPQNFSVDVNCEANLYSLSYQTPNEALQVMVRLSPLTEDDSVDEPSAIDPLPSRPEGASPDSWRLLADSMEAFGERLTEGLLPNHARICYFEHDEPTA

SEQ ID NO: 8980 - protein, 526 aa, Streptococcus downei
MAKDIKFSADARSAMVRGVDVLADTVKVTLGPKGRNVVLEKSFGSPLITNDGVTIAKEIELEDHFENMGAKLVSEVASKTNDIAGDGTTTATVLTQAIVREGLKNVTAGANPIGIRRGIERAVSTAVDELKAIAQPVANKEAIAQVAAVSSRSEKVGEYISEAMEKVGNDGVITIEESRGMATELDVVEGMQFDRGYLSQYMVTDNEKMVADLDNPYILITDKKISNIQDVLPLLEEVLKTSRPLLIIADDVAGEALPTLVLNKIRGTFNVVAVKAPGFGDRRKAMLEDIAILTGGTVITEDLGLELKDATIASLGQAAKITIDKDSTVIVEGAGSADTIAERVAVIKSQLESTTSEFDREKLQERLAKLSGGVAVIKVGAATETELKEMKLRIEDALNATRAAVEEGIVAGGGTALVNVIEKVAALDLDGDQATGRNIVLRALEEPVRQIARNAGYEGSVIIEKLKASQAGTGFNAADGSWVDMVEAGIIDPVKVSRSALQNAASVASLILTTEAVVADHPEEKA

SEQ ID NO: 8981 - protein, 507 aa, Pichia angusta
MSNPPVFTTSQGCPVSDPFTTQRIPLDSTGYKYAPPIGPLLLQDFKLIDTLSHFDRERIPERVVHAKGAGAYGVFEVTDDITDVCSAKFLDTVGKKTRIFTRFSTVGGEKGSADTARDPRGFATKFYTEDGNLDLVYNNTPIFFIRDPIKFPHFIHTQKRNPATNLKDPNMFWDYLTANDESLHQVMYLFSNRGTPASYRTMNGYSGHTYKWYNSKGEWVYVQVHFIANQGVHNLLDEEAGRLAGEDPDHSTRDLWEAIEKGDYPSWECYIQTMTLEQSKKLPFSVFDLTKVWPHKDFPLRHFGRFTLNENPKNYYAETEQIAFSPSHTVPGMEPSNDPVLQSRLFSYPDTHRHRLGPNYHQIPVNCPLKSGSFNPINRDGPMCVDGNLGGTPNYANAYNCPIQYAVSPKASGNKPDEKYTGEVVPYHWEHTDYDYFQPKMFWKVLGRTPGEQESLVKNVANHVSAADEFIQDRVYEYFSKAEPIIGDLIRKKVQELKRKASSPSKI

SEQ ID NO: 8982 - protein, 351 aa, Rubrivivax gelatinosus PM1
MDPIELEQWLSAHPPALADVIRHVAAACARISRAAARAPLAGQLGGAGSLNSQGEPQQRLDVLADACVSQALSACTHVAGWVSEEHADVTVSPEHGSGGAYLVVFDPLDGSSNVETNVAIGSIFSVLPHLFRGTPASAAAFMQPGRRQVAAGYAIYGPSTVLVLSLGQGVHMFTLDPDAPGDAARWVLTRADVEVPVSTTEFAINASNQRFWEKPVQRYVAECLAGQSGPRGRDFNMRWVASLVAEVHRILTRGGVFLYPRDSREPFRPGRLRLLYEAAPMAWLMEQAGAAATTGTGPLLELVPDALHHKVPVILGSRDEVERIVTYHEDPSANVSWQLFKTRSLFIQPQA

SEQ ID NO: 8983 - protein, 710 aa, Saccharomyces cerevisiae
MGNSGSKQHTKHNSKKDDHDGDRKKTLDLPPLTKSDTTHSLKSSRSLRSLRSKRSEASLASNVQAQTQPLSRRSSTLGNGNRNHRRSNNAPITPPNNHYLTSHPSSSRRLSSSSRRSSMGNNNNSELPPSMIQMEPKSPILKNSTSMHSTSSFNSYENALTDDDDDRGDDGGESPSMAKVTRINTSSSADRGSKRTPLRRHNSLQPEKGVTGFSSTSSKLRRRSDNTLPATYPLNAEAGGNGSDYFSNRSNSHASSRKSSFGSTGNTAYSTPLHSPALRKMSSRDNDDSGDNVNGRGTSPIPNLNIDKPSPSASSASKREYLSAYPTLAHRDSSSSLSPRGKGQRSSSSSSSSQRIYVSPPSPTGDFVHGSCADGDNGSRTNTMVEMKRKKPVRPVDIDEIIQRLLDAGYAAKRTKNVCLKNSEIIQICHKARELFLAQPALLELSPSVKIVGDVHGQYADLLRLFTKCGFPPMANYLFLGDYVDRGKQSLETILLLLCYKIKYPENFFLLRGNHECANVTRVYGFYDECKRRCNIKIWKTFVDTFNTLPLAAIVTGKIFCVHGGLSPVLNSMDEIRHVSRPTDVPDFGLINDLLWSDPTDSSNEWEDNERGVSFCYNKVAINKFLNKFGFDLVCRAHMVVEDGYEFFNDRSLVTVFSAPNYCGEFDNWGAVMTVSEGLLCSFELLDPLDSTALKQVMKKGRQERKLANR

SEQ ID NO: 8984 - protein, 442 aa, Mycobacterium avium subsp. paratuberculosis K-10
MPALLWFRRDLRLHDHPALSAAADSDEVLACFVLDPRLQRSSGPRRLQFLGDSLRVLRDELDGRLLVTRGRPDIRIPEIAKAIGASSVHVSEDFTPFGKRRDARVRAALASVPLVATGSPYLVAPGRVTKPDGSPYQVFTPFLRRWRDTGWRPPVKTGAASARWLDPARLGITDCEIPDPGATLDLAAGEEAARNKWKSFVDNGLANYADDRHRPDIEGTSRMSAHLKFGTIHPRTLVADLDLRAAAARAYLRELAFRDFYADVLHHRPASAWRNWNSAFDAIRTDTGAEAGRRFAAWKAGETGFPFVDAGMRQLRQTGFMHNRVRMTVASFLVKDLHLPWQWGAHWFLQQLVDGDLANNQHGWQWCAGCGTDAAPYFRVFNPAAQGEKFDPSGDYIRRWVPELRCADDPHLRTGERPPGYPAPIVDHATERAEALRRYRSM

SEQ ID NO: 8985 - protein, 755 aa, Vibrio parahaemolyticus RIMD 2210633
MSSQRWLWRNQHSVQTNIGSREKDLKITKTKKIKKKHERAYELLAEAAYSDPFAALGPFIDDGEGSLRVWMPGANKVELLVNGEPRVALERDGDSGFILKEQRDLHLTHYRLAVDWNGVEQIIDDPYQYHNIYQEYEHLHTPKDMYHYMGAHFVTLERGGENISGVRFLVYAPHASAVSLVGCFNQWDGRRHPMQRLDYGIWGLFIPGLEEGVQYKFELKGPNGEGLPHKQDPWGFYSEQYPSFASITYDHKRYQWQDAKWQNRAVTQKRDEALSFYELHAGSWKRDGKGDFLNYRELAEQLVPYLVDMGYTHVELMPVSEHPFYGSWGYQPVGLFAPTSRYGSPDDFKFFVDACHQAGIGVVLDWVPAHFPSDDHGLANFDGTPLFHDPDPRRGWHQDWNSYIYDLGREHVRRFLVSNALYWFEQFHIDGIRVDAVASMLYLDYSRSHDQWVPNVDGGNENYDAIATLKWMNEEVYKHFPNAMTIAEESTAFPGVSAPTFMGGLGFGFKWNMGWMHDSLSYVKEDPVHRKYHHNTITFPLVYAHSENYVLSLSHDEVVYGKGSIHNKMPGDEWQQTANLRAYYGYMYGQPGKKLNFMGAEIGQTAEWNHDDQLQWFLLEYERHQGVQKLMRDLNHLYRNEAAMHDQDCVPAGFEWRLQDEADASILAHERISKEGERILIITNFTPVPHERFRLGVPNVGQYELLLNTDDSKYGGSDFKVLTSVKTEKVESESLPQSLELRLPPLSTVFYKLHK

SEQ ID NO: 8986 - protein, 401 aa, Pyrococcus horikoshii OT3
MTLMIRASKRALSIEYAIRDVVLPARELEKKGIKVIRLNIGDPVKFDFQPPEHMKEAYCRAIQEGHNYYGDSEGLIELREAIVKREKEKNGVDITPDDVRVTAAVTEALQLIFGALLDPGDEILIPGPSYPPYTGLVKFYGGKPVEYRTIEEEGWQPDIDDLRKKISERTKAIAVINPNNPTGALYDKKTIEEIINVAGEHDLVVLSDEIYDLMTYEGKHISPGSLTKDVPVIVMNGLSKVYFATGWRLGYMYFVDPEGKLSEVREAIDKLARIRICPNTPGQFAAIAGLTGSMDYLKEYMKKLKERRDFIYKRLNEIPGISTTKPQGAFYIFPRIEEGPWKSDKEFVLDVLHNAHVLFVHGSGFGEYGKGHFRIVFLPPIEILEEAMDRFEKFMRERLSS

SEQ ID NO: 8987 - protein, 196 aa, Selaginella lepidophylla
MADTEFFTEYGEASRYKIQEVIGKGSYGVVCSAIDTHTGEKVAIKKINDIFEHVSDATRILREIKLLRLLRHPDIVEIKHIMLPPSRREFKDIYVVFELMESDLHQVIKANDDLTPEHYQFFLYQLLRALKYIHTGNVFHRDLKPKNILANAYCKLKICDFGLARVAFNDAPTAIFWTDYVATRWYRAPELCGSFF

SEQ ID NO: 8988 - protein, 372 aa, Methylococcus capsulatus str. Bath
MTNPLFQPFRLGPHTLKNRMVMAPLTRSRAGQPGNVPTALNAEYYRQRASAGLIISEATQVSPQGQGYAWTPGIHSAEQVAGWRLVADAVHGAGGLMFMQLWHVGRVSHPALQPGGALPVAPSAIAPTGMAFIVNAEGQGELVPFVTPRVLELDEIPGIVGQYRDGARNAMAAGMDGVEVHAANGYLLDQFLNSSSNHRRDAYGGSPENRARLLMEVLEAVCGVWGADRVGVRLSPLGTFNDMGDADPEATFGYVAERLNDFGLAYLHVVEPFMAGNAPAATPDPRGEAIMAMIRMSFRGPLIVCGGYDQAKAVACLESGRADLVAFGRLFIANPDLPERFRRGAALNGWNEATFYGGGAEGYTDYPSLTDA

SEQ ID NO: 8989 - protein, 282 aa, Staphylococcus aureus subsp. aureus MSSA476
MNHIEISKDVKIPVLGFGVFQIPQEQTAEAVKEAIKAGYRHIDTAQSYLNETEVGQGIEASGIDRSELFITTKVWIENVNYEDTIKSIERSLQRLNLDYLDLVLIHQPYNDVYGSWRALEELKENGKIKAIGVSNFGVDRIVDLGIHNQIQPQVNQIEINPFHQQEEQVAALQQENVVVEAWAPFAEGKNQLFQNQLLQAIADKYNKSIAQVILRWLVERDIVVLAKSVNPERMAQNLDIFDFELTEEDKQQIATLEESNSQFFSHADPEMIKALTSRELDV

SEQ ID NO: 8990 - protein, 474 aa, Arabidopsis thaliana
MAAAVSTVGAINRAPLSLNGSGSGAVSAPASTFLGKKVVTVSRFAQSNKKSNGSFKVLAVKEDKQTDGDRWRGLAYDTSDDQQDITRGKGMVDSVFQAPMGTGTHHAVLSSYEYVSQGLRQYNLDNMMDGFYIAPAFMDKLVVHITKNFLTLPNIKVPLILGIWGGKGQGKSFQCELVMAKMGINPIMMSAGELESGNAGEPAKLIRQRYREAADLIKKGKMCCLLINDLDAGAGRMGGTTQYTVNNQMVNATLMNIADNPTNVQLPGMYNKEENARVPIICTGNDFSTLYAPLIRDGRMEKFYWAPTREDRIGVCKGIFRTDKIKDEDIVTLVDQFPDQSIDFFGALRARVYDDEVRKFVESLGVEKIGKRLVNSREGPPVFEQPEMTYEKLMEYGNMLVMEQENVKRVQLAETYLSQAALGDANADAIGRGTFYGKGAQQVNLPVPEGCTDPVAENFDPTARSDDGTCVYNF

SEQ ID NO: 8991 - protein, 190 aa, Mundulea sericea
  misc_feature (68)..(68): Xaa can be any naturally occurring amino acid
EVVAESKRPDLEPYIGLHYPATDIPQASRFLFKQNRVRMIVDCHASPVRVVQDEALVQPLCLVGSTLXAPHGCHAQYMANMGSIASLVMAVIINGNDEEGVGGRSSMRLWGLVVCHHTSARCIPFPLRYACEFLMQAFGLQLNMELQLAAQALEKRVLRTQTLLCDMLLRDSPTGIVTQSPNIMDLVKCD

SEQ ID NO: 8992 - protein, 200 aa, Dalbergiella nyasae
EDDHGEVIAEITKPGLEPYLGLHYPATDIPQAARFLFMKNKVRMIVDCHAKHVKVLQDEKLPLDLTLCGSTLRAPHSCHLQYMANMDSIASLVMAVVVNDNEEDGDSSDAVQPQKRKRLWGLVVCHNTTPRFVPFPLRYACEFLAQVFAIHVNKEIELEYQIIEKNILRTQTLLCDMLMRDAPLGIVSQSPNIMDLVKCD

SEQ ID NO: 8993 - protein, 436 aa, Arabidopsis thaliana
MASWIFKLLLLLQCVLVLIQHADSSSIIRYLPGFEGPLPFELETGYIGVGQKEEDQLFYYFIKSENNPEEDPLLVWLTGGPGCSSFSGLVYENGPLAFKVETYNGSVPTLVSTTYSWTKVANIIYLDQPVGTGFSYSRNPFADIPSDTGSVKRVNEFVRKWLAKHPEYFSNPFYVTGNSYSGKVIPAIVQEISNGNYICCKPQINLQGYVIGNPVAYYDHDKDFRIPFAHGVALISDELFESLKASCGGSYSVVDPLNTECLKLIEDYDKCVSGIYEELILKSKCEHTSPDCYTYRYLLSEYWADNETVRRALKVVKGSKGTWERCDYRVLSNQDIKSSIPFHINNSIRGYRSLVISGDHDMTIPFLGTQAWIRSLNYSITEKWRPWMILDQVAGYTKTYANKMTLATVKGGGHTLEYKPEENSVLFKRWISGQPL

SEQ ID NO: 8994 - protein, 547 aa, Escherichia coli
AAKDVKFGNDAGVKMLRGVNVLADAVKVTLGPKGRNVVLDKSFGAPTITKDGVSVAREIELEDKFENMGAQMVKEVASKANDAAGDGTTTATVLAQAIITEGLKAVAAGMNPMDLKRGIDKAVTVAVEELKALSVPCSDSKAIAQVGTISANSDETVGKLIAEAMDKVGKEGVITVEDGTGLQDELDVVEGMQFDRGYLSPYFINKPETGAVELESPFILLADKKISNIREMLPVLEAVAKAGKPLLIIAEDVEGEALATLVVNTMRGIVKVAAVKAPGFGDRRKAMLQDIATLTGGTVISEEIGMELEKATLEDLGQAKRVVINKDTTTIIDGVGEEAAIQGRVAQIRQQIEEATSDYDREKLQERVAKLAGGVAVIKVGAATEVEMKEKKARVEDALHATRAAVEEGVVAGGGVALIRVASKLADLRGQNEDQNVGIKVALRAMEAPLRQIVLNCGEEPSVVANTVKGGDGNYGYNAATEEYGNMIDMGILDPTKVTRSALQYAASVAGLMITTECMVTDLPKNDAADLGAAGGMGGMGGMGGMM

SEQ ID NO: 8995 - protein, 196 aa, Dalbergiella nyasae
DHGEVVAEVKKPGLEPYLGLHYPATDIPQATRFSFMKNKVRMIVDCHAKHVKVLQDKKIPFDLTLCGSTLRAPHSCHLQYMENMNSSASLVMAVVVNDNDEDGDSSDAIQPQKRKRLWGLVVCHHTTPRFVPFPLRYACEFLAQVFAIHVNKELELEYQIVEKNILRTQTLLCDMLMRDAPLGIVSQSPNIMDLVK

SEQ ID NO: 8996 - protein, 187 aa, Dalbergiella nyasae
EDEHGEVVSEIRRSDLEPYLGLHYPATDIPQASRLLFKQNRVRMICDCDAKPVKVIQSEELRQPLCLVNSTLRSPHGCHTQYMANMGSIASLVMAVIINGNDTTRLWGLLVCHHTSPRYVPFPVCYACEFLMQAFGLQLYMEIQLASQMAEKRILKTQTLLCDMLLRDAPFGIVNQSPNIMDLVKCD

SEQ ID NO: 8997 - protein, 284 aa, Ralstonia solanacearum
MRRSEEESGMVQGGVPLAVEAIAAFTDNYIWALHDGRVAAVVDPGDAQPVLRFLQARGLALGAIVITHHHGDHVGGVQALVEAYPRDPSGAPLPVIGPADESIPCRTQAVREGDTVTLSHPAATFHVLDVPGHTRGHVAYVGRLQGPDAPASLFCGDTLFATGCGRLFEGTPAQMRLSLSKLAALPPDTRVYCAHEYTAANVRFARAVEPGNAALAAWEDEVASLRTDGRATVPTTVGHERATNPFMRSNEPAVAASVAQHAGIGVDDPVAVFAALREWKNGFR

SEQ ID NO: 8998 - protein, 169 aa, Oryza sativa
  misc_feature (146)..(146): Xaa can be any naturally occurring amino acid
FLDIKDAEGGQRVNRVTVFERPGLHEFLQRTSEFADLILFTAGLEGYAKPLVDRIDAHNRFCHRLYRPSTVTTEYREHVKDLSCLSKDFHRIVLVDNNPYSFLLQPLNGIPCLTFSAGQPVDDQLMGVIFPLLKHLSLQNDVRPAXLYETFHMPEWFQRHGIPQIDQAA

SEQ ID NO: 8999 - protein, 215 aa, Yersinia pseudotuberculosis IP 32953
MKYQIIPVTAFSQNCTLIWCEATGQAALVDPGGEATKIIAEVERQGVTVSQVLLTHGHLDHVGAAAEVAAHFQVPIYGPEKEDTFWLEGLPAQSRMFGLSECEAFTPTRWLEEGDKITVGEIELSVLHCPGHTPGHIVFIDPQGRLALVGDVIFKGGVGRSDFPRGDHQQLINSIRTKLLPLGDDITFIPGHGPMSTLGHERQTNPFIREEPAIW

SEQ ID NO: 9000 - protein, 494 aa, Triticum aestivum
  misc_feature (129)..(129): Xaa can be any naturally occurring amino acid
  misc_feature (138)..(138): Xaa can be any naturally occurring amino acid
MDPYKHRPTSGANAGYWTTNSGAPVWNNNNALTVGQRGPILLEDYHLIEKLAQFDRERIPERVVHARGASAKGFFEVTHDVSQLTCADFLLAPGVQTPVIVRFSTVVHERGSPETLRDPRGFAVKFYTXREGNFDLVXGNNMPVFFIRDGMKFPDMVHAFKPSPKTNMQENWRIVDFFSHHPESLHMFTFLFDDVGIPLNYRHMDGFGVNTYTLISRDGKAHLVKFHWKPTCGVKCLLDDEAVTVGGTCHTHATKDLTDAIAAGNYPEWKLFIQTIDADHEDKFDFDPLDVTKTWPEDIIPLQPVGRMVLNKNIDNFFAENEQLAFCPAVTVPGIHYSDDKLLQTRIFSYADTQRHRLGPNYLMLPVNSPKCAHHNNHHDGLMNFMHRDEEVNYFPSRFDPTRHAEQYPIPPRVLSGCREKCIIKKENNFKQAGERYRSFDPARQDRFLQRWVDALTDARVTHEIQGIWVSYWSQCDASLGQKLASRLKMKPNM

SEQ ID NO: 9001 - protein, 306 aa, Prochlorococcus marinus str. MIT 9313
MVSPLPVSSATNRQQRLWAAVKAHREPLPAKQRRFKWGTTSFMLAMHVAATFALLPRFWSWQGLVAFAVLYWTTVLGVTLGLHRLVAHRSFVVPVWLERILVIMATLACQSGPIEWVALHRHHHRYSDQTNDHHDAGRGLWWAHSEWMLHEIPALDHMDRFAGDLLADPFFRWLDRWFLLLQIPLGLGLYWYGEVAQVHGGGLGLVLWAIPLRLVVVYHVTWFVNSATHAFGYRNFDSPDLSRNCWWVAVLSFGEGWHNNHHAYPSSARHGLRWFEFDITWQHVKALRRLGLARRVQQARYVSGAS

SEQ ID NO: 9002 - protein, 259 aa, Prochlorococcus marinus str. MIT 9313
MIAIHALSILALLPRFWSWQAITTLLVLYWVTACLGVTIGYHRLLSHRSFRVPHWLERFFATCGTLSCQHGPIDWVGLHRHHHKFSDTDPDHHNSHKGFWWSHMGWMFEPIPAMRVVPRLTVDLAADPYYRWLNKYFLLLQLPLAGLLFWIGSVSGAGGLALVLWGIPLRLTIVYHITWLVNSASHCWGTVAFDSGDNSRNNPWVAALTFGEGWHNNHHAFPHSAIHGLQRGQIDLTWQHIRLMRALGLARKIRLPITS

SEQ ID NO: 9003 - protein, 242 aa, Lycopersicon esculentum
MGRGKVELKRIENKINRQVTFAKRRNGLLKKAYELSILCDAEIALIIFSSRGKLYEFCSNSSMSKTLERYHRYNYGTLEGTQTSSDSQNNYQEYLKLKTRVEMLQQSQRHLLGEDLGQLGTKDLEQLERQLDSSLRQIRSTKTQHILDQLAELQQKEQSLTEMNKSLRIKLEELGVTFQTSWHCGEQSVQYRHEQPSHHEGFFQHVNCNNTLPISYGYDNVQPENAAPSTHDATGVVPGWML

SEQ ID NO: 9004 - protein, 336 aa, Streptomyces coelicolor A3(2)
MTTSSDVIPDAPQPAGDAAGPSATLGGEQKRSIEQITLLLFITLPFLALVAAVPLAWGWGVSWLDLGLLVFFYFLGCHGITIGFHRHFTHGSFKAKRPLKIALAIAGSMAVEGPLVRWVADHRKHHKFSDDEGDPHSPWRYGETVPALIKGLWWAHIAWMFDEEQTPQEKYAPDLIKDPALRAVSRQFILWTVVSLALPALIGGLVTMSWWGAFTGFFWGSLVRVALLHHVTWSINSICHAVGKRPFKSRDRSGNVWWLAILSCGESWHNLHHADPTSARHGVMRGQLDSSARLIRWFEQLGWAYDVRWPSRSRIDSRRNTDQDGARRRKETAKAA

SEQ ID NO: 9005 - protein, 248 aa, Silene latifolia subsp. alba
MEFSSQITREEGSPSSQRKLGRGKIEIKRIENTTNRQVTFCKRRNGLLKKAYELSVLCDAEVALIVFSSRGRLYEYANHSVKGTIDRYKKASSDNSGASSAAEANAQYYQQEAAKLRNQIRTVTENNRHLMGEGLSSLNMKDLKSLENKLERGISRIRSKKNELLFAEIEFMQKREVELHNNNQYLRAKIAENERAQQSMSLMPGGSSEYELAPPPQSFDSRNYFQVNALQPNNTHYSRPDQTTLQLN

SEQ ID NO: 9006 - protein, 733 aa, Neurospora crassa
MNDISDNSSNSLANGGTVANSDIPKDGTGICAGVLSIDPWLEPFKDTLKSRYSKAQSWIDTINKTEGGLEKFSRGTEIFGFNVDKDNTITYREWAPNAKQASLIGEFNNWDRNAHRMKKNEFGVFEITIPPTANGQPAIPHNSKIKITLELPDGQWVDRLPAWIKYVTQDLSVSPAYEARFWNPPQSERYTFKHKRPSKPESLRIYEAHVGISSPECKVATYKEFTKTMLPRIKNLGYNAIQLMAIMEHAYYASFGYQVNSFFAASSRYGPPEDLKELVDTAHAMGIAVLLDVVHSHASKNVLDGLNEFDGTDHQYFHGGGRGKHDLWDSRLFNYGHHEVMRFLLSNLRFWMDEYAFDGFRFDGVTSMLYLHHGIGTGFSGGYHEYFGPDVDEEAVVYLMLANEMLHQLYPNVITVAEDVSGMPALCLPLSLGGVGFDYRLAMAIPDMWIKILKEKKDEEWDMANITWTLTNRRHGEKTIAYCESHDQALVGDKTLMMHLCDAELYTNMSILTPLTPVIDRGMALHKMIRLLTHSLGGEGYLNFEGNEFGHPEWLDFPREGNQNSFWYARRQLNLTEDGLLRYQYLNNFDRSMNLTEDKYGWLHAPQAYISLKHEGDKVIVFERAGLVFVFNFHPSNSYTDYRIGIEQAGTYRIVLDSDTKEHGGFNRLDPQTRFFTSDLPWNNRKNSTHVYIPARTAFVSPCARVHPFRVGYERPDIPSVVQVRVMRITAAG

SEQ ID NO: 9007 - protein, 445 aa, Mortierella alpina
MATPLPPSFVVPATQTETRRDPLQHEELPPLFPEKITIFNIWRYLDYKHVLGLGLTPLIALYGLLTTEIQTKTLIWSIIYYYATGLGITAGYHRLWAHRAYNAGPAMSFVLALLGAGAVEGSIKWWSRGHRAHHRWTDTEKDPYSAHRGLFFSHIGWMLIKRPGWKIGHADVDDLNKSKLVQWQHKNYLPLVLIMGVVFPTVVAGLGWGDWRGGYFYAAILRLVFVHHATFCVNSLAHWLGDGPFDDRHSPRDHFITAFVTLGEGYHNFHHQFPQDYRNAIRFYQYDPTKWVIALCAFFGLATHLKTFPENEVRKGQLQMIEKRVLEKKTKLQWGTPIADLPILSFEDFQHACKNDNKKWILLEGVVYDVADFMTEHPGGEKYLKMGVGKDMTAAFNGGMYDHSNAARNLLSLMRVAVVEYGGEVEAQKKNPSMPIYGTDHVKAE

SEQ ID NO: 9008 - protein, 445 aa, Mortierella alpina
MATPLPPTFTVPASSTETRRDPLPHDVLPPLFNGEKVNILNIWKYLDWKHVIGLLVTPLVALYGMCTTELHTKTLVWSIVYYFATGLGITAGYHRLWAHRAYNAGPAMSFALALFGAGAVEGSIKWWSRGHRAHHRWTDTEKDPYSAHRGVFYSHLGWLLIKRPGWKIGHADVDDLNKNPLVQWQHKHYLILVILMGLVFPTAVAGLGWGDWRGGYFYAAILRLIFVHHATFCVNSLAHWLGDGPFDDRHTPRDHFITAFLTLGEGYHNFHHQFPQDYRSAIRFYQYDPTKWLIATCAFFGFASHLKTFPENEIKKGKLQMIEKEVLEKKTKLQWGTPIADLPILSFEDFQHACKNDRKQWILLEGVVYDVADFMTEHPGGEKYIKMGVGKDMTSAFNGGMYDHSNAARNLLSLMRVAVVEFGGEVEAQKSRPSVTVYGDHSKEE

SEQ ID NO: 9009 - protein, 223 aa, Sorghum bicolor
IENKISRQVTFAKRRNGLLKKAYELSLMCDAEVALIIFSGRGRLFEFSSSSCMYKTLERYRSSNYSSQEVKVPLDSEINYQDYLKLRTRVEFLQTTQRNILGEVLGPLSMKELEQLENQIETSLKQIRSRENQMLLDQLFDLKSKEQELQDLNKDLRKKLQETSPENALHVSSWEEGGHSGASGNVLDPYQGLLQHPESDPSLQIGYHQQAYMDQLNNEDMAG

SEQ ID NO: 9010 - protein, 701 aa, Cryptococcus neoformans var. neoformans JEC21
MSARNLASGTPYRKNLSPANSSHFDAPSVSSTSDSVKSAYSVGYTPVPTADRSYSGLLHGTLSKVFRKGGQEIIVSEEPVSFSSSKEDSESTRFNGCPYMNGSIPQTPTPKSTSKSASVAVPVPLPPPSAARLKVQKQNDSIPRENGNALADDVGKLTVRSYEKDRDLKSQEVIYTTSNGVPVPHPYAVQRAGVNGPLLLQDFHLIDLLSHFDRERIPERVVHAKGSGAHGTWECTDGLEDLCLANMFQKGTTCPLTIRFSTVGGESGSPDLARDPRGFAVKFRTAEGNWDFVANNTPVFFLRDPAKFPHFIHTQKRDPATHLSGGDDSTMFWDYLSQNPESIHQVMILMSDRGIPAGWRHMHGYYGHTLKIVNDNGDWVYAQFHLISDQGNKFFTSEEASTKSPDWGQKDLYEAIGRGEYPSWTMKVQVMTQEQAEEAWEKKRINVFDLTHVWPHGDYPLRTIGKITLNENPSNYFAEVEQATFNPAHMIPGVEPSADPVLQARLFSYPDAHRHRVGANYQQLPVNQSATPYATGNFQRDGAMAFYNQGGRPAYLSSIEPIKFREKRVNLNKVHGQFIGEAVSFLSEIRPEDFNAPRALWQKVFSDESKERFIQTVAGHMSTCKRKEIIARQIAIFRQVSPDLGARLEKATNVRGYGSIEGMSFNGTHNGFGVKRGANGLRQDADVVFNNGAPQKTQRAR

SEQ ID NO: 9011 - protein, 246 aa, Silene latifolia subsp. alba
MGRGRVQLKMIENKINRQVTFSKRRSGIIKKAHEISVLCDAEVALIIFSHRGKLFDFASDSCMEKILERYERYCYAEKQLASNDPDAQVNWTFDYAKLKAKLDLLQRNHRQYLGQDLDALNLKELQSLEQQLDVGLKHIRSKKNQLMHDSISELQKKERSMEEQNKMLTKKIKEKGKAATTETQQMQWQQQQQNHQDVATSSDYLIHPPVPLNMSNSYEKEQGGEGSRNDLNLTLESNCWAHHSLF

SEQ ID NO: 9012 - protein, 257 aa, Silene latifolia subsp. alba
MGRGRVQLKRIENKINRQVTFSKRRTGLLKKAHEISVLCDADVGLIVFSTKGKLFEYATDSCMEKILERYERYSYAERQLTAPDPDSHVSWTLEHAKLKARLEILQKNHRHYMGEDLDTLSLKELQNFEHQLDTALKHIRSKKNQLMYESIHELQKKDKALQEHNNTLSKKVKEKEKEKEKEKAIADQQAQWVQQNQELNPSAFFSSQVLPALNIRGNYETGSSVIVNEVAQTQNRSNSSNNNSLVPSWMLNHLAEQ

SEQ ID NO: 9013 - protein, 1555 aa, Wolinella succinogenes
MKKLFALVTLLLLGLTLHASTQKLSLRLQWKHQFEFAGFYTAIEKGYYQEAGLEVELKEYENGVNIIQEVLEGKSHFGIWGSGIIKEQMEGKPILLLANYFKRSPLAIVTSPEIKSPGDLKGKRLMLSEVNIDSANFTHMLQGFGLSMKDIQILSTSFNIHDFIDGKVDAYSIFLTNELFDLQRLGVRYNILDPSNYGVELYDENLFGAKEFVLKNPTLVKRFIDASNRGWQYALDHPEEIVDLILERYNTQNKTKEQLLFEARETAKMVLSRSYPIGSIDPHKVRKIGEIFAEARLAPPAKDYASFLFGQIRTSLDLTEAERAYILMRPTLRVQNESDFAPMNYHSDGGQPAGFSIDYIKLLASKVGLKVEYVSGPTWSEFLQMMRDGRLDAMVNIAKSPEREEYLLFTSPYSEIISAVFTKDSRAQEFSSLNDLKGKKLAVVKGFFEEALLKKHYPEIEMVFAEDTLSALKMVAFGKADAAINSLQVGNFLIKKSGLSGMAPAFEVQDPQFRVNLHVATSSSNSTLRNLLEKAKEQVSDSELLLLTSKWFLQGNAPDKEKRITLSEKERAYLKARSTPFTLCVDPLWMPFEKLDSKGNYEGIAADLLKIVFERTGVEAKVLQTKDWVETLNAVKSGQCDILSFSNQTPAREEWLLFSDPLFQDPNVFITHADHPFITNPKSLEGKTIVLPKGTSIEEWVRRDYPWLKLILVETEEEVFKALLERKADLSIRSLTVAAYTIKKEGLFSLKIAGQLPEKDNHFRMGIKPKEPILRDILNQGIHTLTPEEIDRIANKFVSVNIQKGFDYSLLWKILIGMAGIFVGFFYWNRKLTEYNKALQAAKEKAEAATQEKSNFLANMSHEIRTPMNAIIGMTYLAQQTDLTPLQRDYLQKIEGSANALLGLINDILDFSKIEAGKLEIECIDFDLHSVIEHVSTLVELKATEKNLEFVVSYDQGMNMNLHGDPLRLGQILTNLANNAIKFTHEGEVGIYITKQELHRYRFEVRDTGIGLSPGQKEKLFRSFSQADTSTTRQYGGTGLGLAISKQLVEMMNGRIWVESEEGKGSSFIFEIELNEQENAPKESKAFSHKHVLIVDDTPSWQKILARLLKGFHIEVSVASSGEEALRLIKEQPGFYDLILMDWKMPQMDGIETTKLIKESCETPPPTIIMVSSYRQENIVNAAKEQGINVFLQKPINPSLLYNVLLEILGEGIKQSGVQKADSHSLKNELTTRAGSQILLVEDNAMNREIIMGMLQPFGIRIDIAQNGQEAVTLYQENPKRYELILMDIQMPVMDGYEATKILRAQGANLPIIALTANAMKSDIERTKAAGMDEHLNKPIVVEKLFGTLLAHLTPKCAPQENPSLAPQELQSSTLPTLVHTDTLKGIAHLAGDEALYRKLLRDFIEHYENLEIEPASQEGARILHTLKGLSANLGMDELSRLAKECEENPSLTSLASLTQALSQALQELKESGILSDSTPLIPQIAAPEGRVEEIWSELGSLLPKRRPPLCKPLLEELEGYALNERDRALFERLKPLVERYKFSEALKILEERLS

SEQ ID NO: 9014 - protein, 310 aa, Orobanche ramosa
MVITLNNGFKMPIIGLGVWRTEGKDLKNLIINAIKIGYRHFDCAADYKNEAEVGEALEEALQTGLVKREDLFITTKLWNSDHGHVVEACTDSLKKLRLEYLDLYLVHFPVATKHTGVGTTDSALGDDGILDIDTTISLETTWHAMEDLVSLGLARSIGISNYDIFLTRDCLAYSKIKPAVNQIETHPYFQRESLVKFCQKHGICVTAHTPLGGALANTEWFGTVSCLDDPVIKGLTEKYKKKTVAQIALRWGIQRNTVVIPKTSKQDRLIENFQVFDFELSNEDMELLKTMERKYRTNQPAKFWGIDLFA

SEQ ID NO: 9015 - protein, 408 aa, Chlamydomonas reinhardtii
MQVTMKSSAVSGQRVGGARVATRSVRRAQLQVVAPSRKQMGRWRSIDAGVDASDDQQDITRGREMVDDLFQGGFGAGGTHNAVLSSQEYLSQSRASFNNIEDGFYISPAFLDKMTIHIAKNFMDLPKIKVPLILGIWGGKGQGKTFQCALAYKKLGIAPIVMSAGELESGNAGEPAKLIRTRYREASDIIKKGRMCSLFINDLDAGAGRMGDTTQYTVNNQMVNATLMNIADNPTNVQLPGVYKNEEIPRVPIVCTGNDFSTLYAPLIRDGRMEKYYWNPTREDRIGVCMGIFQEDNVQRREVENLVDTFPGQSIDFFGALRARVYDDMVRQWITDTGVDKIGQQLVNARQKVAMPKVSMDLNVLIKYGKSLVDEQENVKRVQLADAYLSGAELAGHGGSSLPEAYSR

SEQ ID NO: 9016 - protein, 846 aa, Arabidopsis thaliana
MASSSLSNLMLAIHEKKTSSVDLYRPLRNYVTFTYSEREAQLIDDDLETLKQLRSDIERVSDPSPAARRDLLISYYKVLCLVETRFPISPDKDHVNAVSFVWYDAFKQKHKATQQNIHLEKAAVLFNLGASYSQIGLGHDRTTVDGRRQASHAFMAAAGAFAHLRDNESIKATIGPSTTVDVSVECVGMLERLMVAQAQECVFENTIAKGSTPGVSAKIARQVGIFYEEALSALIISPLKDHFDKGWISHVQLKAALFYGEACFRYGKELHEKEEIAEEIARLRSGASRLAEAKKSSRGAPAQLIEAMNTLESSINGNLDRAVKENDRVYLMRVPSPSSLSPLPAFSMVKPMNMTDILDASKEKMFSILVPDSSAKALSRYTEMVDDVIRTQAERLQQASELTRVRLKEMDLPDSILAVDGNSALPVDLKEDVEAVQISGGPAGLEAELQQLRDLKRVNQELLVHTEELLQKEATEDSQFRSQFGTRWTRPQSSTLTKNLQDRLNRFAANLKQAGESDVKIERSVRDNSALMSILDRRPIESAVPTLARPIMSLDATEDAIVGTLKQSLRQLENLGAQRAGLEDMLKEMKRKDDILPKLMTITGSYEDMFRKEISKYDHICEDISQNIEVQEQLLMQIQAQNEEFSTIFNLEDYKASKEKCYKQIQAAIMKYREIKENINEGLKFYVTLQDAITNVKQQCSDFVMTRSIQCRDMIEDVQRQMSGLSFQDHRSSGPYPSVHQPTASSPPPPPETQNPSHPHPHAPYYRPPEQMSRPGYSIPPYGPPPPYHTPHGQAPQPYPPQAQQQPHPSWQQGSYYDPQGQQPRPPYPGQSPYQPPHQGGGYYRQ

SEQ ID NO: 9017 - protein, 457 aa, Bifidobacterium longum DJO10A
MSNDDLTHENFDFRGFDVPDLKAVTLASSSDGDQSKQPKTKHEDASKNRKHGKKKSKSDARSKKRAGAGKTSESFDDYEDYEEREAVSKADKKVSKDRPGLFAPMTLREVTVRNRIWLPPMCTYSSFARDGRPTPFHYQHYVSRAFGGFGMVIVESTAVAPEGRITPCDLGLWEDGQIDAWRWIVDGIREAGAVPAIQLNHAGRKASTGCFAVGYDGQSVPEEAGGWPTMAPSEIAFGGLRTPRALSVDEIHGLVGAFAAAAGRAVAAGFQAIQIHAAHGYLISQFLDPLSNERDDEYGGDLTGRSRFLVEVVDAVRGAVPEGVPVLVRISATDWAAGGWDLDQTIALSKVLKEHGVDVMDVSTGGIMSGVSIPVKPNYQVPFSEQVKAKADIPVTAVGLITKPKQAAKILAHGEADAVEIGRAALRDPYWPLRAANKLGIPSTEIPYAPQYVAGAY

SEQ ID NO: 9018 - protein, 361 aa, Aspergillus nidulans FGSC A4
MATDTSTYKLNHTMLRVKDPKRSVEFYKFLGLNQVQQLDFPDNKFSLYFLAYNGPQSLQGDRHWTDRNAVLELTHNYGTENDPNYSITNGNTEPHRGYGHIAISVDNIEAACQRLEDAGYAFQKKLTEGRMRHIAFVKDPDGYWVEIIKRRDEAMSTSTDPATYRLNHTMLRVKDAEASLKYYQEVLGMTLVRTIENKEAAFNLYFLGYPASNPQATEGANNPVAEWEGLLELTWNYGTEKQEGKVYHNGNDEPQGFGHICVSVDDLNAACERFESLKVNWKKRLTDGRMKNVAFLLDPDGYWIEVIQNEALKRTSNWRIVQARCRPIWVKDSAVSNGGTITHEYKLIKGFARGLEFGGGI

SEQ ID NO: 9019 - protein, 154 aa, Zea mays
MSLVRRSSVFDPFSMDLFDPFDSMFRSIVPSSSSAAAASETAAFASARIDWKETPEAHVFKADLPGVKKEEVKVEVEDGNVLLISGQRSREKEDKGDKWHRVERSSGQFVRRFRLPENAKTEEVRAALENGVLTVTVPKAEVKKPEVKSIQISG

SEQ ID NO: 9020 - protein, 750 aa, Ralstonia eutropha JMP134
MNRVDTRPPERRTQTISDGELGALVEGRHRDPFAILGPHRDGDTLIVRACVPGAHSVMLADSRGEPLAPMTPLHAGGVFTGRLPAGVSVYQLLVRWHNGTQQVSHDPYAFGLLLGELDLHLIAEGRHFELGACLGAQWRNVDGVQGVRFAVWAPNARRVSVIGDFNGWQPARHPMRLRHPSGVWELFIPEAMGARPGCRYKFDLLDPHDAQLPDKADPLALATEAPPATASVVTQPQVSAPPFAWQDDEWMRLRNAVDPYAAPLSIYEVHVGSWLRAANDPARGWEVLADRLIPYVHELGFTHIELLPVTEHPFGGSWGYQPLSLYAPTARLGPPQAFAAFIDRCHRDGIGVILDWVPAHFPTDPHGLARFDGTALYEHEDPREGFHQDWNTLIYNLGRNEVRGFLLAGALHWLEHFHVDGLRVDAVASMLYRDYSRAPDQWVPNRFGGRENLEAVAFLRELNTVVHERCPGALTIAEESTAWPGVTASAASGGLGFDFKWNMGWMHDTLRYLSLDPIHRAWHHQDMTFGTVYAWSEAFVLPLSHDEVVHGKGSMLRKCPGDDWQRFAGLRAYYGFMWAHPGKKLLFMGGELAQWQEWNHDAELDWALLDHPMHRGVHTLVRDLNALYRELPALHELDHSPAGFQWVVGDDHQNSVFAWLRRPAPGSGDVVLAVTNMTPVPRYGYRIGVPSEGCWHERLNTDAACYGGSNLGNGGAVTAEPVPSHGQEASVLLTLPPLATVILQHAGTQA

SEQ ID NO: 9021 - protein, 167 aa, Glycine max
  misc_feature (101)..(101): Xaa can be any naturally occurring amino acid
  misc_feature (119)..(119): Xaa can be any naturally occurring amino acid
MAAISSTSYFSSQPQLPASDGANPATARSSSSNGREPRRRRTGRCIMLEADAASASGSGGAAAGRTRSLTEEDLEELKGCLDLGFGFSYHQIPGLCGTLPXLELCYSMTRRFLDEQRTXSGSLEPATAAAAPITDWKISGPGDDPDEVKARLKYWAQTVACTVKLCT

SEQ ID NO: 9022 - protein, 500 aa, Arabidopsis thaliana
MVLSKTASKSDDSIHSTFASRYVRNSISRFEIPKNSIPKEAAYQIINDELKFDGNPRLNLASFVTTWMEPECDKLMMESINKNNVEMDQYPVTTDLQNRCVNMIARLFNAPLGDGEAAIGVGTVGSSEAVMLAGLAFKRQWQNKRKALGLPYDRPNIVTGANIQVCLEKFARYFEVELKEVKLREGYYVMDPDKAVEMVDENTICVVAILGSTLTGEFEDVKLLNDLLVEKNKKTGWDTPIHVDAASGGFIAPFLYPDLEWDFRLPLVKSINVSGHKYGLVYAGIGWVVWRTKTDLPDELIFHINYLGADQPTFTLNFSKGSSQVIAQYYQLIRLGFEGYRNVMDNCRENMMVLRQGLEKTGRFNIVSKENGVPLVAFSLKDSSRHNEFEVAEMLRRFGWIVPAYTMPADAQHVTVLRVVIREDFSRTLAERLVADFEKVLHELDTLPARVHAKMASGKVNGVKKTPEETQREVTAYWKKFVDTKTDKNGVPLVASITNQ

SEQ ID NO: 9023 - protein, 359 aa, uncultured bacterium 562
MLFEPYKLKNTILRNRVAMAPMTRNQSPGGIPTNEVVEYYKRRAKAEVGLIITEGVEVSHEASSAYPNVPRLDSEEAREGWKKVVEGIKENNGHVIAQLWHCGGFRKLGMGPNPEIPGHTASGLVRPGKRVAHAMSSFDIEETVEAYASDAKICEELGFDGVEIHGAHGYLIDNFFWTGTNDRDDNFGGSIKSRSFLATSITKAIRDNVSNDFIVGLRFSQWKQQDYAAKLAQSPDDLLEVLSGPCNAGLDYLHSSMRRFWESEFEGSDENLAYWTKKLMNIPTMSVGSVGLDGDFTDMMASAKTASIDKAVQDINDEKYDMVAVGRALLSDHEWVIKMKEGRLEDINPYTKDSLIEMY

SEQ ID NO: 9024 - protein, 731 aa, Mycobacterium avium subsp. paratuberculosis K-10
MSHADQLARTHLAPDPADLSRLVAGTHHDPHGILGAHEYGDHTVIRAFRPHATEVAALVGGDRFAMQHIESGLFAVALPFTNLIDYRLQITYPDSEPYVVADAYRFLPTLGEVDLHLFGEGRHERLWEVLGAHPRSFTTADGVVTGVSFAVWAPNAKGISLIGEFNGWTGTEAPMRVLGSSGVWELFWPDFPIGGLYKFKVHGADGVVTERADPMAFATEVPPHTASRVTLSSYTWGDADWMTQRAARNPVFEPMSTYEVHLGSWRPGLSYRQLARELTDYVVEHGFTHVELLPVAEHPFAGSWGYQVTSYYAPTSRFGTPDEFRALVDALHQAGIGVIVDWVPAHFPKDAWALGRFDGTPLYEHSDPKRGEQLDWGTYVFDFGRREVRNFLVANALYWLQEFHIDGLRVDAVASMLYLDYSRPEGGWTPNIYGGRENLEAVQFLQEMNATAHKSAPGIVTIAEESTSWPGVTRPTNLGGLGFSMKWNMGWMHDTLDYISRDPIYRSYHHHEMTFSMLYAFSENYVLPLSHDEVVHGKGTLWGRMPGNNHVKAAGLRSLLAYQWAHPGKQLLFMGQEFGQRAEWSEERGLDWWQLDEQGFSNGILRLVRDINDIYRSHPALWSQDTVPDGYSWIDANDSANNVLSFLRYGKDGSVMACVFNFAGAEHSGYRLGLPSAGRWREVLNTDATVYNGSGIGNMGGVDATEDPWHGRPASAVLVLPPTSALWLEPK

SEQ ID NO: 9025 - protein, 159 aa, Triticum aestivum
  misc_feature (116)..(116): Xaa can be any naturally occurring amino acid
MSLIPRGNAFDPFSPDLWDPFDGFPFGSGGSSSLFPSFPRISSETAAFAGARIDWKETPEAHVFKADVPGLKKEEVKVEVEDGNVLQISGERNKEQEEKTDTWHRVERSSGKFLRXRFRLPEDAKADQIKATMDNGVLTVTVPKEGAKKPEVKSIQISG

SEQ ID NO: 9026 - protein, 741 aa, Vitis vinifera
MESCDCIDPPWPGDELLMKYQYISDFFIALAYFSIPLELIYFVKKSAVFPYRWVLVQFGAFIVLCGATHLINLWTFGMHSRNVEVVMTTAKVLTAVVSCVTALMLVHIIPDLLSVKTRELFLKNKAAELDREMGLIRTQEETGRHVRMLTHEIRSTLDRHTILKTTLIELGRTLSLEECALWMPTRTGLELQLSYTLRQQNPVGFTIPIQHPVINQVFSSNRAVKISPNCPVARLRPLAGKYMPGEVVAVRVPLLHLSNFQINDWPELSTKRYALMVLMLPSDSARQWHVHELELVEVVADQVAVALSHAAILEESMRARDLLMEQNVALDLARREAETAVRARNDFLAVMNHEMRTPMHAIIALSSLLQETELTPEQRLMVEAILKSSSLLATLINDVLDLSRLEDGSLQLENGTFNLHALFREVLYLIKPIASVKKLFVSSSLAPDLPEFAVGDEKRLMQIMLNVVGNAVKFSNEGNISIFAFIAKSESLRDSRAPDFFPVHSDNHFYLRVQVKDSGAGIDPQDISKLFTKFAQCQSLAARNSGGSGLGLAICKRFVNLMGGHIWIESEGLGKGSTAVFIVKLGIPEYSNESKLPFFPKVSANHCQTNFPGLKVLVMDDNGVSRSVTKGLLVHLGCDVTTVSSADDCLRVVSQEHNVVFLDVCMPGVDGYEVAIRIHEKFTTCRQGPLLVALMGNTDRVTKENYLRVGINGVVLKPVSVDKMRCVLSEVLEHRFLFETC

SEQ ID NO: 9027 - protein, 401 aa, Guillardia theta
MQEDMEYNIRFVGSYILDKTLGVGATGKVKLAKHSRTKEKVGVKIIKKDLFYDKPSLRLKIQREISVMKLMFHPHVIKIYDVLEDSKYLFLIIEYASKGELFNYLVEKRKLENREALKFFHEIISGLEYCHKHRICHRDLKLENILLDMKLQIKIADFGMASLSIPNIMLKTFCGSPHYASPEVVSNEPYNGIKADIWSCGIILYALVVGKLPYDEENDNMRKLFNKIRFEPPRIPRIIHPDCRDLIRALLTINPQKRITIDKIKKHPWYKSSPLPESCRISIQNLSFASVQNPISNPDPEIISFLLPLQLVKDKKTLCGILSTKKPSFLRVLYRQLEWRKMKMDSVRSNLINEANFKRKKLFKQGKLGNITGLKYWKNLKCKFLSINIKSFVRTGIYIYF

SEQ ID NO: 9028 - protein, 479 aa, Streptomyces coelicolor A3(2)
MVTAAHRTASAPDAARTFPKGFLWGSATASYQVEGAAAEDGRTPSIWDTYARTPGRVRNGDTGDVATDHYHRRSEDVALMAELGLGAYRFSLAWPRIQPTGRGPAVQKGLDFYRRLVDELLEKGIQPVATLYHWDLPQELEDAGGWPERATAERFAEYAALAADALGDRVRTWTTLNEPWCSAFLGYGSGVHAPGRTDPVAALRAAHHLNLAHGLAVQALRERVRADAQVSVTLNIHHVRPLTGSEGDADAARRIDALANRVFTGPMLNGAYPEDLLKDTAELTDWSFVQDGDLRQAHQPLDFLGVNYYTPTVVSETDGSGAHTSDGHGNSSHSPWPGADRVAFHQPPGDTTAMGWAVDPTGLYDLLRRLSADFPRLPLVITENGAAFDDYADPEGQVNDPARIAYVRGHLAAVHQAILDGADVRGYFLWSLLDNFEWAHGYSKRFGAVYVDYPTGTRIPKASARWYSEVARTGVLPGA

SEQ ID NO: 9029 - protein, 190 aa, Glycine max
KIKKREMATETKVAVLGGITEVQGAANSVEINNLARFAVEEQNKRENSVLEFVRVISAQQQVVSGVNYYITLEAKDGEIKNEYKAKVWERESQELLEFMPTLGAGGEIDHLARFAVEEQNKRENANLEFVGVIRAKQQVVEGFIYYITLEAKDGETKNVYETKVWVRSWLNSKEVLEFKPISINPLSVSV

SEQ ID NO: 9030 - protein, 743 aa, Ralstonia eutropha JMP134
MNIALQVPDRLLPGKPYPLGAQWDGLGVNFAVFSANASRIDLCLFSANGRKELARMPLPECTDEIWHGYLPNAALGTLYGFRAFGPYDPARGHRFNPHKLLLDPYARRLSGPVRWSDALFGYRLQSARADLTPDRRDSAPTMPKAVVVDESFHWGDDRPPGVPWQDTVIYEAHLRGVSMLRDDVLPHQRGTFAALCDPRFLDHLLRMGITAVELLPIHAILQDRFLLERGLRNYWGYNTLSYFAPEPSYLATDQLHELKVAVRRLHAAGIEVILDVVYNHTCEGNELGPTVSWRGLDNASYYQLVPGDERHYLNDTGCGNMLNLPHPRVLQMVLDSLRYWVQCFHVDGFRFDLGATLGRDHNGFDPGASFFDAILQDPVLSRVKLISEPWDLGPGGYQLGNHPPGFAEWNDKFRDTVRRFWRGDSGQRGELAARLSGSADLFDRRHRRPWASVNFITAHDGFTLADLVSYNGKHNDDNGEENRDGTDNNYSANWSPDGSVEGPTDDPAILALRARVAQAMLSTLLLAQGTPMLTAGDEWGRSQQGNNNAYCQDNAMSWLDWKQAQTPRGQVLLQMVRRLLALRLRLPSLGANHFSHGNQEPAPGIGDIAWFDTEGQPPSPEAWAAPEIRTLALRRAAAPPRSERLELAHRATREGQPGPVNVTLLLLNAGDTDVVFRLPEPALAWQLVLDSSQPQAEAGRPSNAITEQAVPAHSLVLLAAQAAPQRFDHPAEPARAAPQEAAS

SEQ ID NO: 9031 - protein, 546 aa, Bacillus thuringiensis serovar konkukian str. 97-27
MEENQDMNSLDEQDVKRETLTTRQGHPVKDNQNIRTIGNRGPATLENYHFIEKISHFDREEVPERVVHARGAGAFGYFETYGKVGDEPVEKYTRAKVFSGAGKKTPLMVRFSTVAGAKDSPETARDPRGFAVKMYTEDGNWDLVGNNLKIFFIRDAMKFPDMIHAFKVDPVSNVANPERMFDFVSRTPEATHMITFLFSPWGIPATYRHMQGSGVNTYKWVNEKSEAVLVKYHWEPKQGIRNLTQEDANSIQAMNVSHATQDLYEAIQRKDYPEWELFVQIMEDGYHPELDFDPLDDTKLWPEEQFPWLPVGRMVLDRNPVDYHSEIEQAAFGTGVLVDGMDFSDDKMLQGRTFSYSDTQRYRVGANYLQLPVNAPKAPVRTNQHRGQMDMRNPKESGENPHINYEPSMLGGYKDAKQEKHHPHQPTYNAAAMSAPIDRPNNYGQAGHTYRSFEEWERNELVKNLSEALAVCDKRIQNAMIEHFTQADEDYGRRVKEGIEKKMKEAKTENKLPGREVSKSKYGQGSLAANEATKDAVKKSHESDPY

SEQ ID NO: 9032 - protein, 191 aa, Cryptococcus neoformans var. neoformans B-3501A
MSEHTNLKSLAPLGNQPEPSANSAGVGPSKPFTEAQVEEFREQDRWLPIANVARIMKSSLPTSAKVSKEAKECVQECVSEFISFITSEAAEKCLNEKRKTLNGEDILTSMRALGFDNYEGVLRVYLAKYRDSHHSIPKRNAQHEDDDEEVQDGRKKRGRGRQPAGGTISTNGHAEGTKSKRKRSDDGKGVR

SEQ ID NO: 9033 - protein, 687 aa, Ralstonia eutropha JMP134
MEFATSHRLAAVFSHWNRSFQAQELILNLTSFFLGTGATSATPRLAPLDSFSASAPQVPAANDDPHSYAFGPVWLPEGRIGFRLWAPDAAQRGESVRLEIAGMGPVRMTACENGWYRAAVPCADGTRYWFRLDDGTTFPDPASRWQPNDVHGPSVACQPKARTYPWKCPDWRGRPWHEAVICELHVGLCGGYAGAMAQLQRLSALGFTAVELMPLAEFPGARNWGYDGVLPFAPESGYGKPDDLRALVDEAHSLGMMVLLDVVYNHFGPEGNYLHHYASAFFRQDRQTPWGPALDFRRREVRRFFTENARYWLEEFRFDGLRLDAVHAIDDEGWLTTLPSDLRALHGLQGRHVHLVLENDHNDASLLSAGFDAQWNDDAHHALHVLLTGEQDGYYRDYGATPGRPANTSQNAGQNTPLRHLARVLREGFAYQGEVSPYRSECDPAQGPVRRGKPSGHLPPTAFVSFLQNHDQIGNRAFGDRLATLADPDALRVAVALQLLCPQVPLVFMGEECGAQTPFYYFTSHPPELAEAVRQGRRQEFAGMAAFRDESQALEIPDPNDPATFEASRPPMDVENDWTRYYRRLLAIRREWLMHRLPRARISGVDVLGPAALRARWRLGDGTCLSIWVNLGEHVAACQPPAPGYAVLHETASGHADAVAGGSLPAMSCIAILSGHGEQAHGAGGAR

SEQ ID NO: 9034 - protein, 860 aa, Rhodopirellula baltica SH 1
MWQAWYEYRIDYALFTIVFLVGHSSILSRVRRAMPPPSTTHPETSTSPEAIGSGLRTRLSFCILVLLLIGGFIAVETADRVQRSRMRQQVFGIAPTYAAELQQLGHANIDEQTSPDDPQYLRMIEAQKRWLSVNPQVTDIYTMRRVTELDLSTRPLPDRENNNGHLYKIIVDSETDYSGDGRIEGVRESRTEIGEIFSDSSVEQIEQAFRGVTTFANQPSRDRWGKWVSAYAPLFDADGKVEALVGVDFPAENYIHSIILTRLGAMGIIAALITLFLGAVTSIGMLKAGIVAQQRSHALLQDQRDLATQAAAQARQAAIIKNQFLANMSHEIRTPMHGILGTAELMTRSSLDEQQRHYMYMIQTSAKGLLTVLNDILDFSKVDSGQMTLESVPFELKDLLSQTMHAVVNLKNEEVDLQFQPPVGVPEIIVGDPTRLRQVLINLVGNALKFTEQGRVTVTVENETRDATTLDTSDSKGSRIAFTITDTGIGMTQQQQAKIFEAFTQGDSSTTRRFGGTGLGLSISSQLVELMGGRLQVSSVPNEGSSFRFDIPLRTTNGVEPHEIAKTQPLETSTKSFGQCDQPRELLLVEDGAINRTVAETMLRSRGHRVTSVSNAKDAIEQLRLHSFDLVLMDVQMPEIDGLTATQIIRNDLPAPASEVPIVALTAHAMREDRQRCLDAGMNDCLTKPYPPEVLFETIESFATHTDNQDDLVSSPQSIEKSPSTNVDEPSAEPLNREVILHNVGGDLQVLAMLVQTITDELPPQMQRLQQAIEVGDSTQIARAAHTLKGTASAIGATRAQEIADRLETFSSGETSQEKSSHFFNNQMKALASAFDLAQTELKKFLRSSSGRENPGNETL

SEQ ID NO: 9035 - protein, 392 aa, Xanthomonas axonopodis pv. citri str. 306
MHGNHSPETLRDPHGFATKFYTSEGNWDLVGNNFPTFFIRDAIKFPDMVHAFKPDPRTNLDDDSRRFDFFSHVPEATRTLTLLYSNEGTPAGYRFMDGNGVHAYKLVNAQGEVHYVKFHWKTLQGIKNLDPKQVAAVQAKDYSHLTNDLVGAIKKGDYPKWDLYVQVLKPEDLAKFDFDPLDATKIWPDVPEQKVGQMVLNKNVDNFFQETEQVALAPANLVPGIEPSEDRLLQGRIFSYADTQLYRIGANGLSLPVNRPRVAVNNGNQDGQGNIGQTTSGVNYEPSRLEPRPQDTAARYSELPLSGTTQQAKITREQNFKQAGELYRSYSKKDRADLVQSFGESLAATDTESKHLMLSFLYKADPEYGTGVTRVAKGDLARVKQLASSLQD

SEQ ID NO: 9036 - protein, 172 aa, Xanthomonas axonopodis pv. citri str. 306
MRPGHLMVLALLAPTLIAPPVFAQSVLTRDNGAKVGDNQNSQTAGATGPTLLQDVQLIQKLQRFDRERIPERVVHARGTGVKGEFTATADLSNLTKAKVFSAGEKTPFFVGGAWQPLAGDAARSAWLRHQVLHQRRQLGSGRQQLPHVLHSRCDQVPRHGACVQAGSAHQSG

SEQ ID NO: 9037 - protein, 548 aa, Buchnera aphidicola str. APS (Acyrthosiphon pisum)
MAAKDVKFGNEARIKMLRGVNVLADAVKVTLGPKGRNVVLDKSFGAPSITKDGVSVAREIELEDKFENMGAQMVKEVASKANDAAGDGTTTATLLAQSIVNEGLKAVAAGMNPMDLKRGIDKAVISAVEELKHLSVPCSDSKAITQVGTISANADEKVGSLIAEAMEKVGNDGVITVEEGTGLQDELEVVKGMQFDRGYLSPYFINKPETGIVELENPYILMADKKISNVREMLPILESVAKSGKPLLIISEDLEGEALATLVVNSMRGIVKVAAVKAPGFGDRRKAMLQDISILTGGSVISEELAMELEKSTLEDLGQAKRVVISKDTTTIIGGVGEKHSIQSRISQIRQEIQEATSDYDKEKLNERLAKLSGGVAVLKVGAATEVEMKEKKARVEDALHATRAAVEEGVVAGGGVALVRVAGKIADLRGQNEDQNVGIRVALRAMEAPLRQIVSNSGEEPSVVTNNVKDGKGNYGYNAATDEYGDMIDFGILDPTKVTRSALQYAASVAGLMITTECMVTDLPKEDKSSDSSSSPAGGMGGMGGMM

SEQ ID NO: 9038 - protein, 293 aa, Nostoc punctiforme PCC 73102
MTANFGAFAKSVGEAIAPERGKSPQLSWTNVVFFTTFHALALMSPWFFSWSALGLLVFLHWLFGSIGICLGYHRLLSHKSFQVPKWLEYAIALIGALALQGGPIFWVGGHRQHHAHTEDINLDPYSAQRGFWWSHILWIFYPRPEFFDYDTYKKYAPDLARQPFYCWLDRYFLLLQIPFALLLYGLGGWPFVFYGVFLRCVLLWHSTWFVNSASHLWGYRTFDANDGARNLWWVSLVTYGEGWHNNHHTYPHMAKSGLSWWEIDVTWWSILVLQTLGLAKKVVSRPPQGATHG

SEQ ID NO: 9039 - protein, 256 aa, Silene latifolia
MGRGRVELKRIENKINRQVTFAKRRNGLLKKAYELSVLCDAEVALIIFSNRGKLYEFCSGPSSMLKTLERYQKCSYGAVEVNKPSKELESSYKEYLKLKARYESLQRAHRNLLGEDLGPLNVKELDQLERQLESSLKQIRCIKTQSMLDQLTDLQSKEHALMEANKSLKAELERIMVKDNQVRQSWEGHHEHQNVHYEHQHAHSQHQHAHSQGLFQPIDCNPNLHLGYNAETSDHQLTAGTSHAQVPGFLPGWMQM

SEQ ID NO: 9040 - protein, 244 aa, Silene latifolia
MGRGRVELKRIENKINRQVTFAKRRNGLLKKAYELSVLCDAEVALIIFSNRGKLYEFCSSPSMLKTLERYQKSNYGPPDNTAVSSREALEISSHQEYIRLKARYEALQRTHRNLMGEDLGPLSSKELESLERQLDMSLKHIRSTRTQYMLDQLADLQRKEHVLNEANITLKQRLIEADQVSSAQCYGHELDYGRQNPQAQADHVFFHPLECEPTLQIGYQPEQMNVTAAGPSINNFMTGWLPQN

SEQ ID NO: 9041 - protein, 703 aa, Saccharophagus degradans 2-40
MIKNIAVSLVFIFSVTCAVAKPPEAPKLIPTKVQSQTIVDVIAQLNARHYRNQAIDDSLSTRFLESYIDSLDPAHMFFYTKDVENFKKHNLKYDDYFRKGKLEEGFEVYRTYRARVVSRLESAIEMLADENVKFDFNAKDEIILDRSELPWPTTQAEADELWYKRTKLSLLNLKLAGKTLEEAKETVTKRYKNQLNRILQQDSADVFEIMVNSLTLLFDPHTNYWSPRTSENFNINMSLSLEGIGAVLQSEDEFTKVVSLVPGGPASKQGQLKPADRIVGVGQGDEGEVVDVTGWRLDEVVDRIRGPKNTVVRLEVLPAKESNGETAVIRIKRDEVKLEDQAAKKGVLELSDEERLYKIGVINLPAFYINFDKANSRDPDYRSSTRDVSRLLDELQAEGVDGIILDLRNNGGGSLREATMLTDLFIDHGTVVQIRTPDGYIARHNHARLRAKYRGPLIVLVNRLSASASEIFAGAIQDYDRGLIVGTQTFGKGTVQSVAPTVEGKIKLTESKFYRVSGDSTQHRGIIPDIELPMLVDMKEVGESAYDNALPWDTIHPVPHAKYFDLDASIPYLTEAHKKRIAHDPDFNYLLDQIAVMEENKRKKAVSLNEKQRIAEKENLEKQAMVIENKRRTGKGQDPYKTLAEYRAAQEEENPEDAPVVSSRETVIDLDGDTLLNESGNILIDYIRFQTTNAQKQASNFSK

SEQ ID NO: 9042 - protein, 478 aa, Prochlorococcus marinus subsp. pastoris str. CCMP1986
MNKPRILFWHRKDLRIFDNQALIKAFSLSDAITSTYIFDKNYSHDFNASSRAWFLGNSLQELGNNWKKMGSRLVLEEGDPVLIIPQLAKKIDAKFVFWNRSIEPYEINRDLEIKNNLKEQNIQVIETWDHLLIEPLKIFSGNNNPYSVYGPFYKNLKSKINLLGSFEQDKVVFQFKDIDNKFKENKAINSSDSVLEKFIKNIKFPGSNICPCRPGENAAQTLLENFINEKKIYSYNSARDFPSHNGTSFLSASLRFGTISIRKVWNATLNLNSDFANQENYLSIETWQKELVWREFYQHCLFHFPELEKGPYRKKWDHFPWQNNNELFQHWSNGETGVPIVDAAMRQLNSTGWMHNRCRMIVASFLVKDLICSWQMGEKKFMETLVDGDLAANNGGWQWSASSGMDPKPLRIFNPYTQAKKFDPICEYIKYWIPELSRVSNSELLNGEISNLEKNNYSSPIVNHNIQQRLFKSLYAEI

SEQ ID NO: 9043 - protein, 554 aa, Escherichia coli K12
MCSIFGVFDIKTDAVELRKKALELSRLMRHRGPDWSGIYASDNAILAHERLSIVDVNAGAQPLYNQQKTHVLAVNGEIYNHQALRAEYGDRYQFQTGSDCEVILALYQEKGPEFLDDLQGMFAFALYDSEKDAYLIGRDHLGIIPLYMGYDEHGQLYVASEMKALVPVCRTIKEFPAGSYLWSQDGEIRSYYHRDWFDYDAVKDNVTDKNELRQALEDSVKSHLMSDVPYGVLLSGGLDSSIISAITKKYAARRVEDQERSEAWWPQLHSFAVGLPGSPDLKAAQEVANHLGTVHHEIHFTVQEGLDAIRDVIYHIETYDVTTIRASTPMYLMSRKIKAMGIKMVLSGEGSDEVFGGYLYFHKAPNAKELHEETVRKLLALHMYDCARANKAMSAWGVEARVPFLDKKFLDVAMRINPQDKMCGNGKMEKHILRECFEAYLPASVAWRQKEQFSDGVGYSWIDTLKEVAAQQVSDQQLETARFRFPYNTPTSKEAYLYREIFEELFPLPSAAECVPGGPSVACSSAKAIEWDEAFKKMDDPSGRAVGVHQSAYK

SEQ ID NO: 9044 - protein, 286 aa, Pediococcus pentosaceus ATCC 25745
MEYVKLNDGNQMPQLGFGVFQVSDLSQAEQAVSDALDTGYRLIDTAAAYDNEEAVGAAIKKSGINRSEIFVTSKLWVDHFTYEKAQQGIEDSLNKLGLDYIDLYLLHQPYGDTAGAWRALIEAQKAGKIKSIGVSNFAPDQLMNLELMSDVKPALNQIEVSPWYQEGEAVGFAQSQDVQVEAWAPFAEGKHNIFSNETIAEIGQKYGKANGQVILRWLLQRGIVVIPKSVHKTRMAENLDVFDFELSDDDMQKMSSLDKNESQFFDHRDPEAIVSIFGESLKALRK

SEQ ID NO: 9045 - protein, 191 aa, Triticum aestivum
  misc_feature (84)..(84): Xaa can be any naturally occurring amino acid
  misc_feature (167)..(167): Xaa can be any naturally occurring amino acid
MMKMTHDDYVHLCLMALASVATGGGQAEAAKGQWLQTLPATTAAACELRFRCSVCGKAFPSHQALGGHKASHRKRAALVLPLKXVSPAEETVASSTSSGVGGHRCSVCHRSFATGQALGGHKRCHYWDGLSVSLTASASGSGSSARDFDLNLTPVTEKAAAGMRRWXEEERGAEPLAVQERRLSSPSLELN

SEQ ID NO: 9046 - protein, 405 aa, Escherichia coli O157:H7 EDL933
MSPIEKSSKLENVCYDIRGPVLKEAKRLEEEGNKVLKLNIGNPAPFGFDAPDEILVDVIRNLPTAQGYCDSKGLYSARKAIMQHYQARGMRDVTVEDIYIGNGVSELIVQAMQALLNSGDEMLVPAPDYPLWTAAVSLSSGKAVHYLCDESSDWFPDLDDIRAKITPRTRGIVIINPNNPTGAVYSKELLMEIVEIARQHNLIIFADEIYDKILYDDAEHHSIAPLAPDLLTITFNGLSKTYRVAGFRQGWMVLNGPKKHAKGYIEGLEMLASMRLCANVPAQHAIQTALGGYQSISEFITPGGRLYEQRNRAWELINDIPGVSCVKPCGALYMFPKIDAKRFNIHDDQKMVLDFLLQEKVLLVQGTAFNWPWPDHFRIVTLPRVDDIELSLSKFARFLSGYHQL

SEQ ID NO: 9047 - protein, 284 aa, Synechococcus sp.
MSYPLHLFWHRRDLRLADNLGLYAARQHTPTVVGVFCFDPALLQGQDVAAVRVAYLLGCLQALKEAYQQRGGCLLMVQGDPRQVIPEVATTLKATAVHWHEDVEPYARERDRVVAATLNDLGIAVHRQWDQLLHPPSAVQTQQGQPYTVYTPFWRNWSALPKAAPVPPPPDFAPLEATEIASIPLPSTHDLGFDWSGELILAPGEAAAAQQLAHFSQHAIYEYGEQRNYPGRPGTALLSPALKFGVIGIRTVWAASEAALEHARSDEARASIRTWQQELAWREF

SEQ ID NO: 9048 - protein, 454 aa, Novosphingobium aromaticivorans DSM 12444
MSDPVIVWFRRDLRLADQAALLAAAAEGPVIPVYILDDDTPRHCRMGGASRWWLHHSLAELDASLRKLGSRLILRRGKCHEELAAVRREAGARVVHALQHYEPWWRNAEKAVAKTIRLVLHEGNYLAPAGSVRTGMGRPYKIYTPFWHALLERMPPAPPLPAPERLEAPAVWPTSDALDDWKLLPTAPDWAGGFRETWTPGENGAEERLQDFADRVARYGETRNLPSIEGTSRLSPHLHFGEISPATIWHRVVNAGGSVDVFLGELGWRDYAQNVIVQFPDYGSRNAREAYDRLEWRDDPEALRAWQQGRTGYPIVDAGMRELWHTGWMHNRVRMIAASFLVKHLLIDWREGERWFWDTLVDADYASNAVNWQWTAGTGVDSNMFVRIMAPLTQSPKFDAAGYIRQWVPELAHLSDRDIHDPAVPPRGYPAKIVSHSEARARALAAHDRMKQPA

SEQ ID NO: 9049 - protein, 533 aa, Solibacter usitatus Ellin6076
MARRRRSLFVLPVIVFACSIAGGFYGPKVEVAAAASQSEDLDKDVRDFSKVLSLVQDNFADHVSADKTIYKGAIPGMLRTLDPHSNFFDAREYQLMREDQKGHYYGVGMQVSPQPSGKTAVKAPFPGSPAYKVGLRPGDLLISVNDKSTEGLNTTEIADLLKGPRGTSVKIVVSREGTKDYLTFTVVRDEISRKSVQDAFWIKPGYAYVKILSFGENTSRELEENLKRLGENNIKGLVLDLRENPGGLLNEGVAVADHFLPKNALIVSHRGRSAPEKAYVAQHGNRGRDYAMVVLVNRYSASAAEIVSGALQDHDRALILGETTFGKGLVQTVYPLSDNTALALTWAHFYTPSGRLIQRDYSNKSFYDYYTHRDESTRNPVDVKMTDGGRTVYGGGGITPDEKYEVPKLDRFEIGLFRNGLFDFTRSYFGAHSAASLSKTWMPDDQVLNELKAHLRSKGTVFTDAEFNKDREWIKRNLAREMYTSAFNVDESDAMFARTDPEVEKAVEMMPKAAALAESAKKIIVQRMAGQGR

SEQ ID NO: 9050 - protein, 116 aa, Zea mays
  misc_feature (40)..(40): Xaa can be any naturally occurring amino acid
  misc_feature (43)..(43): Xaa can be any naturally occurring amino acid
  misc_feature (65)..(65): Xaa can be any naturally occurring amino acid
MADACLIEGNALLPPEVNWLLYLRNLPFNISGEEMYDIFXSTXSSRQIRLDNVIDTRVTAYFFYXDIYDSKNAVYHLSCFNLGNRYLIVLYYQPAKMYNKSDLNKKEDEITRLHEK

SEQ ID NO: 9051 - protein, 278 aa, Staphylococcus epidermidis ATCC 12228
METVQFYNGRTMPKIGLGTYRVKDGDECRESVKYAIERGYRSIDTAMIYGNEETVGQGIKEGLESTGLSREDLFITSKLWLTDFGRQNVEDAYRQSVAKLGLDYLDLYLMHWPGTNEAVMIDTWRGMEDLYKQNQVKNIGVSNFTPEHFEALLAQVSIKPVINQVEFHPYLTQNKLRKYLEAQNIIMESWSPLMNSQILHDEVINEVANEVGKTPAQVVIRWNIQHDVVVIPKSVTPHRIEENLDVWNFELSDNQMERIDQLNQDKRIGPNPLEFDGK

SEQ ID NO: 9052 - protein, 187 aa, Arabidopsis thaliana
MGRGKVELKRIENKINRQVTFAKRRNGLLKKAYELSVLCDAEIALLIFSNRGKLYEFCSSPSGMARTVDKYRKHSYATMDPNQSAKDLQDKYQDYLKLKSRVEILQHSQRHLLGEELSEMDVNELEHLERQVDASLRQIRSTKARSMLDQLSDLKTKEEMLLETNRDLRRKVAIGIFYRKKLKPFVI

SEQ ID NO: 9053 - protein, 493 aa, Shewanella sp. MR-4
MSDNQPQAAKHTLMWFRQDLRLTDNQALTAACDWVRQVPGAKLRAIYIATPSQWLSHDMAPIQIDFIQRHVNLLAQGLASLGIEFELIQLDSFKEVPAFLASYCEKLGVERVFAGREPEINEQKRDQACLDVGIPLVLSDEHCLLPPGTVLNLSGDMYKVFTPFSRKWREVAAKRAILPLAVPAPLGPMLPEPKPISFKERFPFTSKLTSSEQWAAGEGQAKRILTAFIQQKAQDYKQDRDFPALEGTSVISPYLALGVLSPRQCIAALLGRFPEVIVDDTSPGRTWLNELIWREFYRHLLVAFPDLSKGHNFNRQADHVQWRNNQAEFLAWCEGKTGYPIVDAAMRQLNQTGWMHNRLRMVVASFLTKHLLIDWRWGERYFRQHLIDGDLAANNGGWQWSAGCGCDAQPYFRIFNPISQSEKFDPDGSFIRKYLPELASWGIKRLHQPNMQKTPSLFEVPTLESDSAYPYAIVEHNAARARALAVLGVLKKA

SEQ ID NO: 9054 - protein, 251 aa, Brassica napus
MNIAHTIFGVFGNATALFLFLAPSITFKRIIKNKSTEQFSGIPYPMTLLNCLLSAWYGLPFVSKDNTLVSTINGTGAVIETVYVLIFLFYAPKKEKAKIFGVFTAVRAVFATVALVSLFALHGNGRKLFCGIAATVFSIIMYASPLSIMRLVVKTKSVEYMPFFLSLFVFLCGTSWFIYGLIGRDPFVAIPNGFGCALGTVQLILYFIYCGNKGDKSTDDAEKDEKKTVEMKDEEKKKQNVVNGKQQEQQV

SEQ ID NO: 9055 - protein, 353 aa, Triticum aestivum
  misc_feature (151)..(155): Xaa can be any naturally occurring amino acid
  misc_feature (163)..(163): Xaa can be any naturally occurring amino acid
  misc_feature (171)..(171): Xaa can be any naturally occurring amino acid
  misc_feature (205)..(205): Xaa can be any naturally occurring amino acid
  misc_feature (212)..(212): Xaa can be any naturally occurring amino acid
  misc_feature (216)..(217): Xaa can be any naturally occurring amino acid
  misc_feature (220)..(221): Xaa can be any naturally occurring amino acid
  misc_feature (224)..(224): Xaa can be any naturally occurring amino acid
  misc_feature (231)..(231): Xaa can be any naturally occurring amino acid
  misc_feature (234)..(234): Xaa can be any naturally occurring amino acid
  misc_feature (258)..(258): Xaa can be any naturally occurring amino acid
  misc_feature (264)..(264): Xaa can be any naturally occurring amino acid
  misc_feature (274)..(274): Xaa can be any naturally occurring amino acid
AYLGDTIEQVCTKKQAGTGPEFPGYRRPTRPESDALGWQYISGSLPDSRELDHIDNPQLEGYKFDPHGEYVRRWLPELARLPTEWIHHPWDAPASVLQAAGVELGSNYPLPIVELDTAQVRLQEALSEMWQLEAASRAEWTLMRAASQSQXXXXXCPNRVSLXDLQMEVHXEPARVAPNVLTTAQRRQDQMVPTHDTSLNRVETXEISADLXNSVXXLTXXCVXSACIVEXTDXRGEGIDSKPGPMHAGPNGFPHPNXFQQPLXRRRNFLAPSXVSEASSSWTRGDGGVVPVWSPPAASGHSQTYGADEADVSSRSYLDRHPQSHRIMNWHQLSQSLTTGKDVENSVQPNFIG

SEQ ID NO: 9056 - protein, 279 aa, Glycine max
MENRTSSVLPPGFRFHPTDEELIVYYLCNQATSRPCPASIIPEVDIYKFDPWELPEKTDFGEKEWYFFSPRERKYPNGVRPNRATVSGYWKATGTDKAIYSGSKHVGVKKALVFYKGKPPKGLKTDWIMHEYRLIGSRRQANRQVGSMRLDDWVLCRIYKKKNIGKSMEAKEEYPIAQINLTPANNDSEQEMVKFPRTSSLTHLLEMDYLGPISHILSDATYNSTFDFQINTANGGIDPFVKPQPVEIPYAADSGKYQVKQNSTINPTIFVNQVYYQRG

SEQ ID NO: 9057 - protein, 692 aa, Cryptococcus neoformans var. neoformans JEC21
MSQMLNQAANMVTGDAKYRQMAEYTIDQDDKTPYTTYFGVKVSDTDNSLRAGARGPTLLEDFHNREKIQHFDHERIPERVVHARGAGAFGEFKLHTPLTGITTAKVLTDTSKVVPAYVRFSTVAGSRGSADTVRDVRGFATRLYTDEGNWDIVGNNIPVFFINAQTAHDNAWDFMSLHKPALHMQQWITSDRAIPRSYRMMQGFGVHTFRLINEEGKSTFVKYHWIPHLGTHSLVWDEALKIAGQDPDFHRRDLWDAIEAGTYAKWDLGVQLIKEEDEHKFDFDLLDATKLIPDELVPVQKIGTLTLNRNPVDYFSEVEQVAFCTQHIVPGMDFTDDPLLAGRNFSYPDTQVSRLGINWKHIPVNRPVCPFMTTMREGQMSMFSKNNRTPYHPNRNENLPLTSPKEGGFKSYPAKVSGIKERVQAPKFNDHSSQATLFWNSMSDVEKKHIIDAYKFELSHCTDNLVIQNVINCINEIDHGLATAVHSGFPHLSLPEAKPNHGKRTEYLSQITGKNQIFTAAGRKIGIFLVPGYVYSQVAPLLAAFKAAGCMVKFVGPTLGPVEASDGQSFTTEFTFEGCRSTYFDALIFAGGPDNAFLSKLKVGRLIHAAREAYMHLKAVGAVGNATQWLVDTCLPGEFSPKVKTESSVVQENGVVFAPINPTLHSAQFAKQFLDGVANHRVWDREVSHIAA

SEQ ID NO: 9058 - protein, 714 aa, Cryptococcus neoformans var. neoformans JEC21
MAQMLNQAVTAVTGDAKYRQMAENTIEQTSKTPLTTYFGVKVPETDVALRAGARGPTLLEDFHNREKIQHFDHERIPERVVHARGSAAHGEFKLHTPLTGITTAKVLTDTSKVVPAYVRFSTVVGSRGSADTVRDVRGFATRFYTDEGNWDLVGNNIPVFFIQDAIKFPDVIHALKPEPHNEMPQAQTAHDNAWDFISLHQQATHMQQWVTSDRAIPRSYRMMQGFGVHTFRLINEEGKSTFVKYHWIPHLGIHSLVWDEALKIAGQDPDFHRRDLWDAIEAKAYPKWELGVQLIKEEDEHKFDFDILDSTKIIPEELVPVQKIGTLTLTRNPVDFFAEVEQVAFCTQHIVPGMDFTDDPLLAGRNFSYADTQISRLGTNWHDLPINRPICPVMTNFRDGQMSMFSKTNRTPYHPNRHDSLPLTSSNNGGFQSYREKISGVKERLNGPKFQEFYSQATLFWNSMSETEREHIIAAYNFELSHCAEDIVIQNVINSLNEIDHGLATSVHATFPHLTLPEAKPTHNKKSEYLSQINGKHQVFTASGRRIGIYLVPGYTYSQVVPLLAAFEADGCMVKFIGPTLGPIKASNGQSFTAEFTFEGCRTTFFDAIVFVGGPDDSFIAKLKIGRLIHAAREAYMHLKPIGVLGNATQWMVNTCLPGDFSEKTKTESSVVVENGVVFAPGDPTLHSIKFAKQFLEGVAHHRVWDRQVAHIAA

SEQ ID NO: 9059 - protein, 339 aa, Synechococcus elongatus PCC 7942
MAQSTTSETHTRDLDRDCTTLSRHVLEQFQSFSPEAQDLAALMQRIGLAAKLIARRLSHAGLVDDALGFTGEINVQGEASKRMDVYANQVFISVFRQSGLVCRLASEEMEKPYYIPENCPIGRYTLLYDPLDGSANVDVDLNVGSIFAVRRQEFYDESHEAKDLLQPGDRQIAAGYVLYGASTLLVYSMGQGVHVFVLDPSLGEFVLAQSDIQLPNSGQIYSVNEGNFCSGPKVSPVHPGNASPRRLQRRYSGALVADFHRILMQGGVFLYPETVKNPTGKLRLLYEAPPMAFLAEQAGGKASDGQKPILLRQPQALHRRCPLIIGSAADVDFVDSLLG

SEQ ID NO: 9060 - protein, 120 aa, Cryptococcus neoformans var. neoformans JEC21
MQRPNDSLAQRALFVKNLNFNITGADLYDLFGKYGPIRQIRLGTDANLKTKGTAYVVFESPDDAKEAVNQLNGFHLMERYIVVLYHHPSKQQASALAKAELRAREEALAEEKRRLGMKDE

SEQ ID NO: 9061 - protein, 278 aa, Streptomyces avermitilis MA-4680
MSTKVPPITLNNGVEMPQLGFGVWQVPDDEAERAVATALEAGYRSIDTAAIYGNEEGTGKAIATAGIPRADLFVTTKLWNSDQGYDSTLRAFDVSLEKLGLDYIDLYLIHWPLPTRGQFVETYKAFEKIYADGRAKAIGVSNFLPEHLRTLIDATSVIPAVNQIELHPHLQQHAAREFHAEHGIATEAWSPLGSGKGLLEVPAIVAIARKHERTPAQVVLRWHIQLGNIVIPKSVTPSRIKENIEVFDFSLDDEDIAAISALNEDRRLGPDPATFDMG

SEQ ID NO: 9062 - protein, 289 aa, Triticum aestivum
  misc_feature (231)..(231): Xaa can be any naturally occurring amino acid
  misc_feature (253)..(253): Xaa can be any naturally occurring amino acid
MGEQKGNILMGKYEMGKMLGQGTFAKVYHARNIETSQSVAIKVTDKEKVLKGGLTDQIKREISVMKLVKHPNIVQMYEVMATKTKIYFVLEHVKGGELFNKVQRGRLKEDAARKYFQQLICAVDFCHSRGVYHRDLKPENLLLDENSNLKVSDFGLSTISECRRLDGLLHTSCGTPAYVAPEVINRKGYDGAKADIWSCGVILFVLLAGYLPFQDKNLMNMYKKIGKAEFXCPSWFSSDIRRLLLRILDPNPXTRISIERIMEHPWFRKGLDAKLLRYNLQAKDAGSCC

SEQ ID NO: 9063 - protein, 373 aa, Arabidopsis thaliana
MAKEIESATDLGDTNIKGVLVHGGRYFQYNVYGNLFEVSNKYVPPIRPIGRGASVLSVDSETHEEIAIKKIGKAFDNKVDAKRTLREIKLLRHLEHENVVVIKDIIRPPKKEDFVDVYIVFELMDTDLHQIIRSNQSLNDDHCQYFLYQILRGLKYIHSANVLHRDLKPSNLLLNSNCDLKITDFGLARTTSETEYMTEYVVTRWYRAPELLLNSSEYTSAIDVWSVGCIFAEIMTREPLFPGKDYVHQLKLITELIGSPDGASLEFLRSANARKYVKELPKFPRQNFSARFPSMNSTAIDLLEKMLVFDPVKRITVEEALCYPYLSALHDLNDEPVCSNHFSFHFEDPSSTEEEIKELVWLESVKFNPLPSI

SEQ ID NO: 9064 - protein, 476 aa, Bacillus thuringiensis serovar konkukian str. 97-27
MQNKIIVMFQKDFRLYDNPALFEAAQSGEVVPVYVHDETFSMGSASKWWLHHAIIDVKKQLEALGSTLIIRKGSTQEEILSLVEQLGITAVYWNICYDPDRLQFNQKMKMMLEHKGMICKEFNSHLLLEPWVIKKKDNTEYKVFTPFYNAFQKQVIHKPISKVQSIKGGNSLPVSLSVSELHLLPTIPWTSHMESIWEPTEEGAYKTWKEFFSSKLASYSEGRDFPNQNAHSMLAPYLSFGQISVKLIYHYLINKSTESQCSLFEKQVNSFIRQLIWREFSYYLLYHYPFTAYKPLNKSFEHFPWNNEEELLRVWQKGDTGYPFIDAGMRELWQTGFMHNRTRMAVASFLVKHLLIPWQEGAKWFMDTLLDADIANNTMGWQWVAGSGADASPYFRIFNPITQGEKFDKNGEYIREWVPELKDMPNKYIHKPWEAPEHILQKANIQLGHTYPLPVVDHKAARERALCAYKSMKEFV

SEQ ID NO: 9065 - protein, 589 aa, Zea mays
MGSKNLSSSQMIRAPLSLSASRIHAPAPAPSSVAIPASTAPHRTVSAAMRRFAADRARRAVAASLHGAASRSAAPSPHAPAPRHPASPVGAAAMAAAMVRTMSTTAAGTPPVSVATINPKVLKCEYAVRGEIVTHAQNLQQELQKNPESLPFDEILYCNIGNPQSLGQQPVTYFREVLSLCDHPALLDKSETHALYSSDAIERAWQILEKIPGRATGAYSHSQGIKGLRDEIAAGIAARDGFHASGDNIFLTDGASPAVHMMMQLLISSESDGILCPIPQYPLYSASIALHGGSLVPYFLNEETGWGLDVDELKKQLEEARSKGITVRALVVINPGNPTGQVLVEENQKKIVEFCKNEGLVLLADEVYQENIYVEDKPFHSFKKIARSLGYTDDDLPLVSFQSVSKGYYGECGKRGGYMEITGFSPDVREQIYKVASVNLCSNVSGQILASLVMNPPKAGDESFESFMSERDGILSSLARRAKALEEAFNSLEGITCNKAEGAMYLFPRLHLPQKAIGAAQAVGTAPDAYYAKRLLEATGIVVVPGSGFGQVPGTWHFRCTILPQEDKIPAIVSRLKEFHEKFMDEFRD

SEQ ID NO: 9066 - protein, 492 aa, Vigna radiata var. radiata
MDPYKYRPSSAFNSPFWTTNSGAPVWNNNNSLTVGTRGPILLEDYHLVEKLANFDRERIPERVVHARGASAKGFFEVTHDVSHLTCADFLRAPGVQTPVIVRFSTVIHERGSPETLRDPRGFAVKFYTREGNFDLVGNNLPVFFVRDGMKFPDMVHALKPNPKNHIQENWRILDFFSHFPESLHMFSFLFDDLGVPQDYRHMDGFGVNTYTLINKAGKAVYVKFHWKTTSGVKCLLEEEAIKVGGANHSHATQDLHDSIAAGNYPEWKLFIQTIDPEHEDKFDFDPLDVTKTWPEDIIPLQPVGRLVLNKNIDNFFAENEQLAFCPAIIVPGVYYSDDKMLQTRIFSYADSQRHRLGPNYLLLPANAPKSAHHNNHHEGFMNFIHRDEEVNYFPSRYDPVRHAEKFPIPPAVFSGRREKIAIEKENNFKQAGERFRSWAPDRQDRFIRRWVDALSDPRVTHEIRSVWISYWSQADRSLGQKIASHLNMRPNI

SEQ ID NO: 9067 - protein, 544 aa, Agrobacterium tumefaciens str. C58
MAAKEVKFGRSAREKMLKGVDILADAVKVTLGPKGRNVVIDKSFGAPRITKDGVSVAKEIELEDKFENMGAQLVREVASKTNDIAGDGTTTATVLAQAIVREGAKAVAAGMNPMDLKRGIDLAVAEVVKDLQAKAKKINTSEEVAQVGTISANGERQIGLDIAEAMQRVGNEGVITVEEAKTAETELEVVEGMQFDRGYLSPYFVTNPEKMVADLEDAYILLHEKKLSNLQAMLPVLEAVVQTGKPLVIIAEDVEGEALATLVVNKLRGGLKIAAVKAPGFGDRRKAMLEDIAILTGGTVISEDLGIKLESVTLDMLGKSKKVSISKENTTIVDGAGQKSDIEGRVAQIKAQIEETTSDYDREKLQERLAKLAGGVAVIRVGGSTEVEVKEKKDRIDDALNATRAAVQEGIVPGGGVALLRSSTKITVKGVNDDQEAGINIVRKALQSLVRQIAENAGDEASIVVGKILDKNEDNYGYNAQTGEYGDLIALGIVDPVKVVRTALQNAASVASLLITTEAMIAELPKKESAMPQMPGGGMGGMDF

SEQ ID NO: 9068 - protein, 820 aa, Oryza sativa (japonica cultivar-group)
MLCLTSSSSSAPAPLLPSLADRPSPGIAGGGGNVRLSVVSSPRRSWPGKVKTNFSVPATARKNKTMVTVVEEVDHLPIYDLDPKLEEFKDHFNYRIKRYLDQKCLIEKHEGGLEEFSKGYLKFGINTVDGATIYREWAPAAQEAQLIGEFNNWNGAKHKMEKDKFGIWSIKISHVNGKPAIPHNSKVKFRFRHGGGAWVDRIPAWIRYATFDASKFGAPYDGVHWDPPACERYVFKHPRPPKPDAPRIYEAHVGMSGEEPEVSTYREFADNVLPRIRANNYNTVQLMAIMEHSYYASFGYHVTNFFAVSSRSGTPEDLKYLVDKAHSLGLRVLMDVVHSHASNNVTDGLNGYDVGQNTHESYFHTGDRGYHKLWDSRLFNYANWEVLRFLLSNLRYWMDEFMFDGFRFDGVTSMLYHHHGINKGFTGNYKEYFSLDTDVDAIVYMMLANHLMHKLLPEATIVAEDVSGMPVLCRPVDEGGVGFDFRLAMAIPDRWIDYLKNKEDRKWSMSEIVQTLTNRRYTEKCIAYAESHDQSIVGDKTIAFLLMDKEMYTGMSDLQPASPTINRGIALQKMIHFITMALGGDGYLNFMGNEFGHPEWIDFPREGNNWSYDKCRRQWSLVDTDHLRYKYMNAFDQAMNALEEEFSFLSSSKQIVSDMNEKDKVIVFERGDLVFVFNFHPNKTYKGYKVGCDLPGKYRVALDSDALVFGGHGRLAMMWITSRLPRECQEYQKQISTTALTHSKSFPRPVPVWAYYRVDEDREELRRGGAVASGKIVTEYIDVEATSGETISGGWKGSEKDDCGKKGMKFVFRSSDEDCK

SEQ ID NO: 9069 - protein, 609 aa, Rhodopirellula baltica SH 1
MDSPRPAIPLQRHSRWNRRMDLLTTINRCLAFDKQADQSNEGKAIAKHARRRRVAGRMRTFALVVGAIAVGGSSMPAFAQGFVPSRGPTVSAPTNDAERKLEEQERARALTDGIELEDAGQWSDAIDHYESATRRFPQDRILYQRLLISRLRFDVNRRYQDQTYLRSLRDMTTSQSLDLYSEILANLQTHYVDTIEWSRVLLHGTAALETALDDETFVQTMLPNATPEQIEKFRMEIHHRISQRSTQSRFDLRATVSQVASMAQQELGLSGTATVLEFVSGAVSTLDTYTRLLSPGQLDDMFSTIDGNFVGLGVELKPGEDCLNILSVIPGGPADEAGIVAGDRIMGVDAISAADRDPDYVADLLRGPEGSLVSLEIASVDQQPRSIRVARRRVDVPCVENIHLVDTDAKIGYFRLTNFQKSTPAEVEKALWALSRQGMRSLIIDLRDNPGGLLPASVEVADRFIDNGRILTTRGRNARENFDYSAHRANTWNVPLAVLIDRNSASASEIFSGAIRDSNRGTVVGEKSYGKGSVQGIFRMQAAQFGLCLTTAKFYSPSGRAISRNGVEPHLSVPPTYIAARPDENGRLVTELEDDVLQRAIEHLAQPAH

SEQ ID NO: 9070 - protein, 265 aa, Cucumis sativus
GIMQMGLAENQLSFDLLESWLTKNPDAASFKRDGKSIFRELALFQDYHGLPAFKKALVEFMAEIRGNKVTFEANNIVLTAGATSANETLMFCLAEAGDAFLLPTPYYPGFDRDLKWRTGVEIVPIHCTSSNGFQVTQPALEQAYQEAQARNLRVKGVLVTNPSNPLGTTMTRNELDLVFDFITSKGIHLISDEIYSGTVFGSPGFVSAMEVLKERSNEDEEVWKRVHIVYSLSKDLGLPGFRVGAIYSNDEMVVAAATKMSSFAL

SEQ ID NO: 9071 - protein, 1013 aa, Arabidopsis thaliana
MKFIYNPTLRHVTVCVIKSKAFLANNGRKTTRVGMDHPDPIRKRYRPSSAYNAPFYTTNGGAPVSNNISSLTIGERGPVLLEDYHLIEKVANFTRERIPERVVHARGISAKGFFEVTHDISNLTCADFLRAPGVQTPVIVRFSTVVHERASPETMRDIRGFAVKFYTREGNFDLVGNNTPVFFIRDGIQFPDVVHALKPNPKTNIQEYWRILDYMSHLPESLLTWCWMFDDVGIPQDYRHMEGFGVHTYTLIAKSGKVLFVKFHWKPTCGIKNLTDEEAKVVGGANHSHATKDLHDAIASGNYPEWKLFIQTMDPADEDKFDFDPLDVTKIWPEDILPLQPVGRLVLNRTIDNFFNETEQLAFNPGLVVPGIYYSDDKLLQCRIFAYGDTQRHRLGPNYLQLPVNAPKCAHHNNHHEGFMNFMHRDEEINYYPSKFDPVRCAEKVPTPTNSYTGIRTKCVIKKENNFKQAGDRYRSWAPDRQDRFVKRWVEILSEPRLTHEIRGIWISYWSQADRSLGQKLASRLNVRPSSAHDSPFFTTNSGAPVWNNNSSLTVGTRGPILLEDYHLLEKLANFDRERIPERVVHARGASAKGFFEVTHDITQLTSADFLRGPGVQTPVIVRFSTVIHERGSPETLRDPRGFAVKFYTREGNFDLVGNNFPVFFVRDGMKFPDMVHALKPNPKSHIQENWRILDFFSHHPESLHMFSFLFDDLGIPQDYRHMEGAGVNTYMLINKAGKAHYVKFHWKPTCGIKCLSDEEAIRVGGANHSHATKDLYDSIAAGNYPQWNLFVQVMDPAHEDKFDFDPLDVTKIWPEDILPLQPVGRLVLNKNIDNFFNENEQIAFCPALVVPGIHYSDDKLLQTRIFSYADSQRHRLGPNYLQLPVNAPKCAHHNNHHDGFMNFMHRDEEVNYFPSRLDPVRHAEKYPTTPIVCSGNREKCFIGKENNFKQPGERYRSWDSDRQERFVKRFVEALSEPRVTHEIRSIWISYWSQADKSLGQKLATRLNVRPNF

SEQ ID NO: 9072 - protein, 101 aa, Manihot esculenta
MATLGGIKEVEESANSVEIDNLARFAVDDYNKKQNALLEFKRVVSTKQQVVAGTMYYITLEVADGGQTKVYEAKVWEKPWLNFKEVQEFKPIGVAPSDSTA

SEQ ID NO: 9073 - protein, 481 aa, Pseudomonas aeruginosa PAO1
MNGLPMNLIWFRCDLRTTDNSALLAAADGRPCLALYLLSPAQWREHDDAPCKVDFWLRNLGELQRQLAALNIPLLVRDCGHWRQAPEVIGRLCRELGVGAVHVNQEYGVNEERRDQAVGQRLREQGVAFHSHLDQLFFAPGSVLTRTGGYFQVFSQFRKVCHERLYQALPGVRPRPQPQPPHALASDPLPDAVPAFPRPADSLRRLWPAGEEVAQERLRDFADQHLADYHERRDFPALPGTSQLSPYLAAGVLSPRQCLDAALVANRGEFSGGQQGAATWINELLWREFYKHILVGYPRVSRHRPFREETEALRWRQAPAELEAWQQGRTGIPIIDAAMRQLLATGWMHNRLRMVVAMFLSKNLLIDWREGERWFMRHLIDGDLAANNGGWQWSASTGTDAVPYFRLFNPLSQSERFDPRGEFIRHWLPELAGLERKAIHDPSSLGLFAGVDYPRPMVDLKASRERALAAFRNLPPRDGRA

SEQ ID NO: 9074 - protein, 274 aa, Glycine max
MHVSNGRQWLPTPEAADGLQSELPFEFQVLEIALEAVCTYLDSNVGDLERGAYPVLDELARNVSTKNLEHVRSLKSNLTRLLARVQKVRDEIEHLLDDNEDMAQLYLTRKWLQNQQFEEAHLGATTSNNFPNTSRSVRRLGSNRSESLVTCHYEDDNNVEDLEMLLDAYFMQLDGTRNKILSVREYIDDTEDYVNIQLDNHRNELIQLQLTLTIASFAIAIETMIAGAFGMNIPCNLYHIDGVFWPFVWITSAACVLLFLLILAYARWKKLLGS

SEQ ID NO: 9075 - protein, 357 aa, Streptomyces coelicolor A3(2)
MTSLFDSYRLGELTLPNRMVMAPMSRVRAAGGGLATPSMATYYAQRATAGLIVSEGVQPNEVGQSNPGTPGLHTDEQVAAWRPVTAAVHTNGGRIFAQIMHGGRVSHPDTTGMLPVGPSAVPAVGEVFTPTGPQPVPTPRALETAEVPEQARSYAEAARRAVDAGFDGVELHGANGYLISQFLSTNANLRTDRYGGPVAHRIRFAVEAVSATVEAVGADRTGIRLSPAGTFWGVEETDVLDLYTELLTELSRLGIAYVHIEATADEELLVALRRVWPGTLVMNPVLPMGPKQTGREDADHWLGLGADLISFGRGFIANPDLVERLRTGLPVAPVDESTYYQGGDAGYLTYPAYQHTV

SEQ ID NO: 9076 - protein, 277 aa, Bacillus cereus ATCC 10987
MSLTSLKDYTTLHNGVKMPWFGLGVFKVEDGSEVIESVKAAIKNGYRSIDTAAIYQNEEGVGQAIRESGVSREELFITSKVWNSDQGYETTLQAFETTLEKLGLEYLDLYLVHWPVKGKYTESWKALEKLYKDGRVRAIGVSNFHIHHLQDVFEIAEIKPMVNQVEYHPRLAQEELHAFCKEHNIQLEAWSPLMQGQLLDNPTLQEIATKYNKSTAQIILRWDLQNEVVTIPKSIKEHRIIENANIFDFELSADDMKAIQALNEDRRVGPDPDNFNF

SEQ ID NO: 9077 - protein, 231 aa, Zea mays
MVAGLEDPAIDPTALSLALPASAPALNKEDYIAICLAALAGTRKFGLGREKDQHQHTKWCPTTTTTHAPSAQQELRFRCAVCGKAFATYQALGGHKSSHRKPTTPERYAAALAAAATTTAARGDHSDETTASSLSGSAASGGPHRCSICRRGFATGQALGGHKRCHYWDGMSVSISVSSGMASSSGLSTVRNFDLNLAPLPENGDAGMMKRWAEEEEVQSPLPIKKRRMSD

SEQ ID NO: 9078 - protein, 408 aa, Malus x domestica
ALGEDSPYFAGWKAYDENPYHESSNPSGVIQMGLAENQVSFDLLEKHLEENSEASNWGSKGTKGVSGFRENALFQDYHGLLSFRKAMANFMEQIRGGRAKFDPVRVVLTAGATAANELLTFIIADPGDALLVPTPYYPGFDRDLRGRTGVNIVPIHCESSNNFQITPQALEAAYKEAEAKNMRVRGVLITNPSNPLGATIQRAVLEEILDFVTQKNIHLVSDEIYSGSAFSSSEFISVAEILEDRQYKDAERVHIVYSLSKDLGLPGFRVGTVYSYNDKVVTTARRMSSFTLISSQTQHLLASMLSDKEFTGNYIKTNRERLRTRYDMIVQGLKKSGIECLKGNAGLFCWMNLSPFLDEPTRECELTLWDSMLHEVKLNISPGSSCHCSEPGWFRVCFANMSEQTLEG

SEQ ID NO: 9079 - protein, 365 aa, Aspergillus oryzae
MAEFVRAQIFGTTFEITSRYTELQPVGMGAFGLVCSARDQLTGQPVAVKKIMKPFSTPVLSKRTYRELKLLKHLRHENIISLSDIFISPLEDIYFVTELLGTDLHRLLTSRPLEKQFIQYFLYQILRGLKYVHSAGVVHRDLKPSNILINENCDLKICDFGLARIQDPQMTGYVSTRYYRAPEIMLTWQKYDVEVDIWSAACIFAEMLEGKPLFPGKDHVNQFSIITELLGTPPDDVIETICSENTLRFVKSLPKRERQPLATKFKNADPDAVDLLERMLVFDPKKRIRAGEALAHEYLAPYHDPTDEPVAEEKFDWSFNDADLPVDTWKIMMYSEILDFHNIDQGTEASQVLVEGAGDAQQNFV

SEQ ID NO: 9080 - protein, 506 aa, Streptomyces coelicolor A3(2)
MTDTPPATTTDSGAPAESDEHSLTAGPAGPVLLQDAYLIEQMAQFNRERIPERQPHAKGSGAFGHFEVTHDVSAYTKAAVFQPGTRTDLVARFSTVAGERGSPDTWRDPRGFAVKFYTSQGNYDMVGNNTPVFFVKDPMKFQHFIRSQKRRADSNLRDHDMQWDFWTLSPESAHQVTWLMGDRGIPRTWRHMNGYTSHTYMWINASGERFWVKYHFKTDQGIEYFTQHEADQMAAADTDYHMRDLFEHIRDGDFPSWTLHVQVMPYEEAAGYRFNPFDLTKVWPHGDYPLIPVGRMTLERNPTDNHAEIEQAAFQPNNLVPGIGPSPDRMLLARLFSYADAHRYRIGANYQQLPVNAPVVDVRTYSKDGAMAYRKTTDPVYAPNSKGGPAADTEHFGTPPSWETDGSITRTAYVSHAEDDDWGQPGTLVREVMDDAARDRLVDNVVDHLLNEVTEPVLQRAFAYWSNIDRTIGDRIAKGVRAKAGEKDFKAAEQRNPARQAMQDKA

SEQ ID NO: 9081 - protein, 372 aa, Comamonas sp. NCIMB 9872
MKKVFDLFDLKGLKLRNRVVMAPMSRARILDSTPDSSTALYYGQRAGAGLIIAEGANVSPQACGTMGTAGIYLPEHVAGWRLTTQAVHTAGGRIFLQLAHAGRVSHRSLQPEGAAPVSSTSKHALNTTVFGINAAGHTAPLQTSMPQCLTEQELAGIRSDFVRAARLAMQAGFDGVEIHAGNGFLFEQFINGALNDRQGLYGGAPAAHRLRFLLETLDAVASAIGPDHVGVKVTPFSRLADMPSYEGETQTWLAFANEPLLGSLAYVHAAFGDVDASFALQFRQALRGTLMRPCSPDAAAANAMLEQGLADLVVMGRPFISNPDLVERMRHGWPLSLASDTTVYGGGSAGYTDYPFYKPAQEADNSSADALV

SEQ ID NO: 9082 - protein, 314 aa, Coccidioides posadasii
MASRHTTFRLNTGEDIPAIGFGTWQDENAQEDAVLTALSAGYRHIDTAAVYGTEKAIGRALARSRLSRDELFITSKLWNNKHRPEDVEQAIDQSLKNLEIDYLDLYLMHWPAAFAPGDDMFPKDSQGNSKTVDIDYVDTYKAMEKLVKSGKTKAIGISNFSKGEMERLLESCSIVPAVMQMELHPWLQQNDFVEWLKSKGIHVTQYSSLGNQNEVYSGRERYGRLIEDPALAAIGTKYGKTGAQVALAWGITKGHSVLVKSKTPHRIQQNFESDFELKQEDMKAIENIDKKLRFNDSSADFGYNFFVGLEGKEK

SEQ ID NO: 9083 - protein, 214 aa, Glycine max
MGQQSLIYSFVARGTMILAEHTDFSGNFAEVALQCLQRLPASDNKFTYNADGHTFNYLTYNGFTYCVVAVESVGRQLAMAYLERIMEDFSKRYGGGKATTATAKSLNKEFGSKLKEHMQYCVEHPEEVSKLAKVKAQVSEVQQVMRANIDQVLDRQVKIDVLVGQTEDLRNQAGVFRERGDQIRRKMWYQNMKIKLIVLAIVIAIILIIVLLVT

SEQ ID NO: 9084 - protein, 477 aa, Lycopersicon esculentum
MGLISKIATNDGHGENSAYFDGWKAYENDPFHPTQNPNGVIQMGLAENQLCFDLIQEWIVNNPKASICTYEGVQDFQDTAIFQDYHGLPEFRKAVARFMEKVRGDRVRFDPERIVMSGGATGAHESLAFCLADPGDAFLVPTPYYPGFDRDLRWRTGVQLFPVVCESSNNFKVTKEALEEAYSKAQESNIKVKGLLINNPSNPLGTILDKETLKDILRFINDKNIHLVCDEIYAATAFSQPSFISISEVKSEVVGCNDDLVHIVYSLSKDLGFPGFRVGIIYSYNDAVVNIARKMSSFGLVSTQTQRLIASMLLDTIFVEDFIAKSSMRLLQRYGLFTKGLGQVGITTLKSNAGLFIWMDLRRFLENSTFDDELKLWHIIIDKVKLNVSPGCSFHCSEPGWFRVCFANMDDATMKIALRRIRHFVYLQPNKGVEVATKKQYCRTRSKLEISLSFRRLDDFMNSPHSPMSSPMVQARN

SEQ ID NO: 9085 - protein, 469 aa, Frankia sp. CcI3
MPRSGTALGDRTGISRSGRTSTQPSSSESLPRGELAGTPPTGRKSAGQPTYPGQMEFTQSDKLADVCYDVRGPVLDEATRLEAAGSRILKLNIGNPAPFGFSAPPEVLEAVVANLADAQGYSDSKGLLAAREAVVRYHLRKGVTGIDPGGVYLGNGVSELIMMSLQALLNNGDEVLLPAPDYPLWTAVVSLCGGRPVHYLCDESAGWAPDLDDIAAKVTPRTRAIVVINPNNPTGAVYDRQVLENIVEVARRHHLMLLSDEIYDRILYEDAEHIATAALAPDLVCMTFNGLSKSYRLAGFRAGWMVMSGPRGHASSYIEGVNILANMRLCANAPGQFATVAALTEDGGAGDLVLPGGRLREQRDTVVKLLNDIPGVSCVPPRGALYAFPRLDPAVYPIRDDERFVLDLLLAEKILLVQGSGFNWPHPDHVRIVTLPAVDDLTDAIGRIDRFLASYKRPSQQQCPSQRRN

SEQ ID NO: 9086 - protein, 493 aa, Oryza sativa
  misc_feature (405)..(405): Xaa can be any naturally occurring amino acid
MDPCKFRPSSSFDTKTTTTNAGAPVWNDNEALTVGPRGPILLEDYHLIEKVAHFARERIPERVVHARGASAKGFFECTHDVTDITCADFLRSPGAQTPVIVRFSTVIHERGSPETIRDPRGFAVKFYTREGNWDLLGNNFPVFFIRDGIKFPDVIHAFKPNPRSHVQEYWRVFDFLSHQPESLHTFFFLFDDVGIPTDYRHMDGFGVNTYTFVTRDAKARYVKFHWKPTCGVSCLMDDEATLVGGKNHSHATQDLYDSIAAGNFPEWKLFVQVIDPEEEERFDFDTLDDTKTWPEDEVPLRPVGRLVLNRNVDNFFNENEQLAFGPGLVVPGIYYSDDKMLQCRVFAYADTQRYRLGPNYLMLPVNAPKCAHHNNHYDGAMNFMHRDEEVDYYPSRHAPLRHAPXPTPITPRPVVGRRQKATIHKQNDFKQPGERYRSWAPDRQERFIRRFAGELAHPKVSPELRAIWVNYLSQCDESLGVKIANRLNVKPSM

SEQ ID NO: 9087 - protein, 630 aa, Aquifex aeolicus VF5
MKKFSLISDYDVYLFKEGTHTRLYDKLGSHVIELNGKRYTFFAVWAPHADYVSLIGDFNEWDKGSTPMVKREDGSGIWEVLLEGDLTGSKYKYFIKNGNYEVDKSDPFAFFCEQPPGNASVVWKLNYRWNDSEYMKKRKRVNSHDSPISIYEVHVGSWRRVPEEGNRFLSYRELAEYLPYYVKEMGFTHVEFLPVMEHPFYGSWGYQITGYFAPTSRYGTPQDFMYLIDKLHQEGIGVILDWVPSHFPTDAHGLAYFDGTHLYEYEDWRKRWHPDWNSFVFDYGKPEVRSFLLSSAHFWLDKYHADGLRVDAVASMLYLDYSRKEWVPNIYGGKENLEAIEFLRKFNESVYRNFPDVQTIAEESTAWPMVSRPTYVGGLGFGMKWNMGWMNDTLFYFSKDPIYRKYHHEVLTFSIWYAFSENFVLPLSHDEVVHGKGSLIGKMPGDYWQKFANLRALFGYMWAHPGKKLLFMGGEFGQFKEWDHETSLDWHLLEYPSHRGIQRLVKDLNEVYRREKALHETDFSPEGFEWVDFHDWEKSVISFLRKDKSGKEIILVVCNFTPVPRYDYRVGVPKGGYWREIMNTDAKEYWGSGMGNLGGKEADKIPWHGRKFSLSLTLPPLSVIYLKHEG

SEQ ID NO: 9088 - protein, 339 aa, Glycine max
MDHSADAQRTDLMTITRFVLNEQSKHPESRGDFSILLSHIVLGCKFVCSAVNKAGLAKLIGLAGETNVQGEEQKKLDVLSNDVFIKALISSGRTCILVSEEDEEATFVEPSKRGKYCVVFDPLDGSSNIDCGVSIGTIFGIYLIKEDHEPTVEDVLQPGKNMLAAGYCMYGSSCTLVLSTGSGVNGFTLDPSLGEFILTHPDIKIPKKGKIYSVNEGNAKNWDGPTTMYVENCKYPKDGSSPKSLRYIGSMVADVHRTLLYGGIFLYPADKKSPNGKLRVLYEVFPMSFLMEQAGGQAFTGNQRALDLVPKKLHERSPIFLGSYEDVEEIKALYSADEK

SEQ ID NO: 9089 - protein, 246 aa, Brassica napus
MNIAHTIFGVFGNATALFLFLAPSITFKRIIKNKSTEQFSGIPYPMTLLNCLLSAWYGLPFVSKDNTLVSTINGTGALIERVYVLIFLFYAPKKEKAKIFGVFTAVLAVFATVALVSLFALHGNARKLFCGIAATVFSIIMYASPLSIMRLVIKTKSVEYMPFFLSLFVFLCGTSWFIYGLIGRDPFVAIPNGFGCALGTLQLILYIIYCGNKGEKSAEKDDKSLEMKGEEKKQNVVNGKQQEQQV

SEQ ID NO: 9090 - protein, 686 aa, Pseudomonas fluorescens PfO-1
MAFEAMFQPIQIGKLTIRNRVLSTAHAEVYATDGGMTTERYVKYYEEKAKGGIGLAICGGSSVVAIDSPQQWWSSVNLSTDRIIPHFQNLADAMHKHGAKIMIQITHMGRRSRWDGFHWPTLMSPSGIREPVHRATCKTIEPEEIWRVIGNYAQAARRAKAGGLDGVELSAVHQHMIDQFWSPRVNKRTDEWGGTFEGRMKFGLEVLKAVRAEVGDDFCVGMRICGDEFHPDGLSHEDMKQIAKYYDDTGMLDFIGVVGSGCDTHNTLANVIPNMSYPPEPFLHLAAGIKEVVKVPVLHAQNIKDPNQATRILEGGYVDMVGMTRAHIADPHLIAKIKMGQIDQIKQCVGANYCIDRQYQGLDVLCIQNAATSREYMGVPHIIEKSTGPKRKVVIVGAGPAGMEAARVAAERGHDVTLFEKKEFIGGQITTASKAPQRDQIAGITRWFQLELARLKVDLRLGTAADADTIMDLRPDIVVLAVGGHPYLEQNEHWGAAEGLVVSSWDVLDGKVAPGKNVLVYDTICEFTGMSVADFLADKGSQVEIVTDDIKPGVAIGGTSFPTYYRSMYPKEVIMTGDMMLEKVYREGDKLVAVLENEYTGAKEERVVDQVVVENGVRPDEEIYYALKDGSRNKGQIDVEALFAIQPQPSLSSTGDGYLLFRIGDCVAQRNTHAAIYDALRLCKDF

SEQ ID NO: 9091 - protein, 272 aa, Saccharophagus degradans 2-40
MNMQLGSPVSVHPIPIYQGNYVWVMRHTSQNSVVVVDPGSASEVIEYITQHELTIASIIITHSHWDHVTGIAELCANLQLWRDEEPVVYGPSVIQDVTHPVEDGDRIELCKGVDVPSLQVIATPGHMPEHLSYLLPLTTPKLFCGDTLFSCGCGRILQGTHEQLRTSLDAISALPSQTEVYCTHEYTLTNIKFARTVEPQSQALIDYEQRVRSLRKNDLPSIPTTIEREKALNPFLRYKELSIQQAVENHLRLKGLTAADVFKHLRLWKDSF

SEQ ID NO: 9092 - protein, 283 aa, Tropheryma whipplei str. Twist
MVVFVLTYVPSVLLGDGVSIPQFGLGTYELPPNEASSVVQSAIELGYRHIDTASLYANEREVGRAIASSGIKREEFFVTTKLWNSDQPKPREAFERSLDLLSLDYVDLYLIHWPCPPSELYINVWEVLLELKESGRAKSVGVSNFLSEHIDKIKEAGFPLPSVNQIELHPWLQQRELVLSCRNDGIQIESWGPFARFSKDLDAFPELTRPAKQYGKTPAQVILRWHIQKGYVVFPKTVHAERLRQNIDIFDFDLTPDEISGIDSLDAGFRTGPDPSSFRAGLD

SEQ ID NO: 9093 - protein, 477 aa, Lycopersicon esculentum
NSILSKLATNEEHGENSPYFDGWKAYDSDPFHPLKNPNGVIQMGLAENQLCLDLIEDWIKRNPKGSICSEGIKSFKAIANFQDYHGLPEFRKAIAKFMEKTRGGRVRFDPERVVMAGGATGANETIIFCLADPGDAFLVPSPYYPAFNRDLRWRTGVQLIPIHCESSNNFKITSKAVKEAYENAQKSNIKVKGLILTNPSNPLGTTLDKDTLKSVLSFTNQHNIHLVCDEIYAATVFDTPQFVSIAEILDEQEMTYCNKDLVHIVYSLSKDMGLPGFRVGIIYSFNDDVVNCARKMSSFGLVSTQTQYFLAAMLSDEKFVDNFLRESAMRLGKRHKHFTNGLEVVGIKCLKNNAGLFCWMDLRPLLRESTFDSEMSLWRVIINDVKLNVSPGSSFECQEPGWFRVCFANMDDGTVDIALARIRRFVGVEKSGDKSSSMEKKQQWKKNNLRLSFSKRMYDESVLSPLSSPIPPSPLVR

SEQ ID NO: 9094 - protein, 485 aa, Lycopersicon esculentum
MGFEIAKTNSILSKLATNEEHGENSPYFDGWKAYDSDPFHPLKNPNGVIQMGLAENQLCLDLIEDWIKRNPKGSICSEGIKSFKAIANFQDYHGLPEFRKAIAKFMEKTRGGRVRFDPERVVMAGGATGANETIIFCLADPGDAFLVPSPYYPAFNRDLRWRTGVQLIPIHCESSNNFKITSKAVKEAYENAQKSNIKVKGLILTNPSNPLGTTLDKDTLKSVLSFTNQHNIHLVCDEIYAATVFDTPQFVSIAEILDEQEMTYCNKDLVHIVYSLSKDMGLPGFRVGIIYSFNDDVVNCARKMSSFGLVSTQTQYFLAAMLSDEKFVDNFLRESAMRLGKRHKHFTNGLEVVGIKCLKNNAGLFCWMDLRPLLRESTFDSEMSLWRVIINDVKLNVSPGSSFECQEPGWFRVCFANMDDGTVDIALARIRRFVGVEKSGDKSSSMEKKQQWKKNNLRLSFSKRMYDESVLSPLSSPIPPSPLVR

SEQ ID NO: 9095 - protein, 457 aa, Streptomyces avermitilis MA-4680
MNVSVVLFTSDLRLHDHPPLRAALDGARQVVPLFVRDRAVDGAGFAAPNRLAFLADCLRDLDAGLRERGGRLVLRSGDVVDQVCKVAAEADADEVHLAAGVSAYAHRREQRLRSALEADGRRLHVHETVITAVAPGAVTPSSSDHFAVFTPYFRHWEREHLRDALGAPRGVRVPESVGSERLPTRTELSGLSQGLAAGGEEEGRKRLMAWLRGGITAYEDRHDDLAGDATSHLSPHLHFGTLSPVELVHRARRTGGPGAEAFVRQLAWRDFHYQVLAARPDAATADYRGRGDRWRSEAAAREEVEAWRTGRTGYPVIDAAMRQLRHEGWMHNRGRLLTASFLTKTLYVDWRVGARHFLELLVDGDVANNQLNWQWMAGTGTDTRPNRVLNPVTQAKRYDPDGAYVRRWVPELEGLRGAAVHEPWKLKGLDRAAYDYPDPIVELADGLARFRHARGRD

SEQ ID NO: 9096 - protein, 472 aa, Escherichia coli K12
MTTHLVWFRQDLRLHDNLALAAACRNSSARVLALYIATPRQWATHNMSPRQAELINAQLNGLQIALAEKGIPLLFREVDDFVASVEIVKQVCAENSVTHLFYNYQYEVNERARDVEVERALRNVVCEGFDDSVILPPGAVMTGNHEMYKVFTPFKNAWLKRLREGMPECVAAPKVRSSGSIEPSPSITLNYPRQSFDTAHFPVEEKAAIAQLRQFCQNGAGEYEQQRDFPAVEGTSRLSASLATGGLSPRQCLHRLLAEQPQALDGGAGSVWLNELIWREFYRHLITYHPSLCKHRPFIAWTDRVQWQSNPAHLQAWQEGKTGYPIVDAAMRQLNSTGWMHNRLRMITASFLVKDLLIDWREGERYFMSQLIDGDLAANNGGWQWAASTGTDAAPYFRIFNPTTQGEKFDHEGEFIRQWLPELRDVPGKVVHEPWKWAQKAGVTLDYPQPIVEHKEARVQTLAAYEAARKGK

SEQ ID NO: 9097 - protein, 485 aa, Lycopersicon esculentum
MGFEIAKTNSILSKLATNEEHGENSPYFDGWKAYDSDPFHPLKNPNGVIQMGLAENQLCLDLIEDWIKRNPKGSICSEGIKSFKAIANFQDYHGLPEFRKAIAKFMEKTRGGRVRFDPERVVMVGGATGANETIIFCLADPGDAFLVPSPYYPAFNRDLRWRTGVQLIPIHCESSNNFKITSKAVKEAYENAQKSNIKVKGLILTNPSNPLGTTLDKDTLKSVLSFTNQHNIHLVCDEIYAATVFDTPQFVSIAEILDEQEMTYCNKDLVHIVYSLSKDMGLPGFRVGIIYSFNDDVVNCARKMSSFGLVSTQTQYFLAAMLSDEKFVDNFLRESAMRLGKRHKHFTNGLEVVGIKCLKNNAGLFCWMDLRPLLRESTFDSEMSLWRVIINDVKLNVSPGSSFECQEPGWFRVCFANMDDGTVDIALARIRRFVGVEKSGDKSSSMEKKQQWKKNNLRLSFSKRMYDESVLSPLSSPIPPSPLVR

SEQ ID NO: 9098 - protein, 391 aa, Acorus gramineus
PYEVPMTAAGALQSYKLAAKAIARLQSLPGGSMERLCDTMVREVFELTGYDRVMAYKFHEDDHGEVVAEITKQGLEPYLGLHYPATDIPQAARFLFMKNKVRMICDCRAKPVKVFQDEKLTIDLAFCGSTLRAPHSCHLQYMENMDSIASLVMAVVINDGDDDDDHVGDNNNDNSKKKRLWGLVVCHNTSPRFVPFPLRYACEFLTQVFAIHVHKELELENQMPEKNILRTQTLLCDMILRDAPLGIVSQTPNIMDLVKCDGAALLYKDKIWQLGTTPTERQIRDIAIWLTDYHMDSTGLSTDSLHDAGYPDALALGDVVCGMAAARITSKDILFWFRSPTTSEIQWGGAKHERSDQDDGRRMHPRSSFKAFLEVVKTRSLPWKDYEMDAI

SEQ ID NO: 9099 - protein, 407 aa, Acorus gramineus
ILHRIDVGLVIDLEPVNPSDVPVTAAGALKSYKLAAKAISRLQSLPSGNISLLCDVLVREVSDLTGYDRVMVYKFHEDEHGEVIAEQRKTDLEPYLGLHYPATDIPQASRFLFMKNKVRIICDCFTPPVKVVQDKKLGQPLSLCGSTLRAPHGCHAQYMANMGSIASLVMAVTINDDDDDDGNGNEQQQKGRKLWGLVVCHHTSPRFIPFPLRYACEFLIQVFSIQLNKEVELAAQMREKHILRTQTVLCDMLLRDAPVGIFTQSPNVMDLVMCDGAALYYKNQFWLLGTTPSEVQIKDLVDWLHECHNGSTGLSTDSLMEASYPGASALGNAACGMAAIKIGGTRDYMFWFRSQTAKEIKWGGAKHDPVDNDEEGQKMHPRSSFKAFLEVVKWRSLPWENAEMDAI

SEQ ID NO: 9100 - protein, 385 aa, Amborella trichopoda
PYEVPMTAAGALQSYKLAAKAISRLQSLPSGNIDRLCHTVVQEVHELTGYDRTMAYKFHEDDHGEVISEITKGGLEPYLGLHYPATDIPQAARFLFMKNGVRMICDCRARHVRVFQDEKLASDLTLCGSTLRAPHSCHLQYMENMDSIASLVMAVVVNEDEEENIADGPKRKRLWGLVVCHNTSPRFVPFPLRYACEFLMQVFAIHVNKEVELEALVREKNILRTQTMLCDMLLRDALLGIVTKNPNVMDLVKCDGATLLYENKLWRLGVTPSEVHIRDLARWLSEYHTDSTGLSTDSLVEAGYPDGVSLGDLVCGMAAVKITETDMLFWSRSHTASEIRWGGAKHDPNDKDDKRRMHPRSSFKAFLEVVKTRSFPWKDYEMDAI

SEQ ID NO: 9101 - protein, 394 aa, Amborella trichopoda
DLEPVNPADVPVTAAGALKSYKLAAKAISKLQSLPSGNIELLCDVLVREVRELTGYDRVMAYKFHEDEHGEVVAEYRRADLDPYLGLHYPATDIPQASRFLFLKNKVRMICDCTASPVKVIQDKKLDKPLSLCGSTLRAPHGCHAQYMANMGSIASLVMSVTINENDEDSSPNEPSFHKGRKLWGLVVCHHTTPRFVPFPLRYACEFLLQVFGIQLNKEVELAAQLREKHILRTQTVLCDMLLRDAPVGIVTQSPNIMDLVKCDGAALYYQKQVWLLGTTPLEAQIRDISGWLLEYHCGSTGLSTDSLMEAGYPGALALGDAVCGMAAVKITSKDFLFWFRSHTAKVIKWGGAKHDPVDRDDGRKMHPRSSFKAFLEVVKQRSLPWEDVEMDAI

SEQ ID NO: 9102 - protein, 727 aa, Xanthomonas axonopodis pv. citri str. 306
MTYNVSSCMKAGLLALVLTTPMALLARADTALPAAATPDQATATKLVYGLLSDSRYAYRPRTLDEAMSKDVFKRYLETLDGGKQFFTQADIDSFAPLQAGVGDALRGGNLEPAFKVFSVYKKRVDQRVKYARDLLKQDFDFSGNDKFEYDRKDVPWAADDKQLDVLWRQSVMNDWLRLKLAGKKPDDIRKTLDKRYVALADSVKQLKGEDVFQFFVNAYTNAVDPHTDYFTPRTAETFNQQMSLSLEGIGAQLQKQDDMVVIREVIPGGPAAVDGTLKPGDRIVGVGQAKSGAIEDVIGWRIDDVVAKIRGSKDTQVRLEYIPAESGIDGKHRTVTLTRQKVRLAEQAAKGETITLPATGSEPQRRIGIIKLPGFYQDFEGRRRNAADYASATRDVAKLLAGFKTDKVDGVVLDLRNNGGGSLDEAIELTGLFIEQGPVVQVRESGGRVTVNGDSDPKVAWDGPLAVLINRGSASASEIFAGAIQDYGRGLVIGETSFGKGTVQNIVDLDRWPAAEGQRYGQVKLTIAQFFRVSGSSTQHKGVVPDIAFPASVDATEFGESTYDNALPWTRIAAAPHTQYGNFAALLPKLQALHTARIASDKEFQWWEEDVKQFRDEKAKKYISLNEAERVAERQKQDQQRKDRQQIRKQLGLPLDPLAEDSDDGLTGNERDIVKDTAREKAAEKRPDPLLHESAAILADALGLLSQDKPLSAQVLPKSTSPGRWAD

SEQ ID NO: 9103 - protein, 240 aa, Arabidopsis thaliana
MGRGKIAIKRINNSTSRQVTFSKRRNGLLKKAKELAILCDAEVGVIIFSSTGRLYDFSSSSMKSVIERYSDAKGETSSENDPASEIQFWQKEAAILKRQLHNLQENHRQMMGEELSGLSVEALQNLENQLELSLRGVRMKKDQMLIEEIQVLNREGNLVHQENLDLHKKVNLMHQQNMELHEKVSEVEGVKIANKNSLLTNGLDMRDTSNEHVHLQLSQPQHDHETHSKAIQLNYFSFIA

SEQ ID NO: 9104 - protein, 642 aa, Zea mays
FCFALQFRPSSSHDTTVTTTNAGAPVWNDNEALTVGPRGPILLEDYHLIEKVAHFARERIPERVVHARGASAKGFFECTHDVTSLTCADFLRAPGVRTPVIVRFSTVIHERGSPETIRDPRGFAVKFYTREGNWDLLGNNFPVFFIRDGIKFPDVIHAFKPNPRSHVQEYWRVFDFLSHLPESLHTFFFLFDDVGVPSDYRHMEGFGVNTYTFVSAAGKAQYVKFHWKPTCGVRCILTDEEAALVGGRNHSHATQDLYDSPETIRDPRGFAVKFYTREGNWDLLGNNFPVFFIRDGIKFPDVIHAFKPNPRSHVQEYWRVFDFLSHLPESLHTFFFLFDDVGVPSDYRHMEGFGVNTYTFVSAAEKAQYVKFHWKPTCGVRCILTHEEAALVGGRNHSHATQDLYDSIAAGSFPEWTLYVQVMDPDTEEQYDFDPLDDTKTWPEDLLPLRPVGRLVLDRNVDNFFNENEQLAFGPGLVVPGIYYSDDKMLQCRVFAYADTQRYRLGPNYLMLPVNAPRCAHHNNHYDGAMNFMHRDEEVDYYPSRHAPLRQAAPPTPLPPRPVAGRREKATIRKPNDFKQPGERYRSWDADRQDRFVRRFADSLGHPKVSQELRSIWIDLLAKCDASLGMKIATRLNMKPNM

SEQ ID NO: 9105 - protein, 116 aa, Triticum aestivum
MSSRGGKLAPEVNRALFVKNLSYNVTPEELFDLFGKFGPIRQVRQGIANNTKGTAFVVYEDVTDAKQACDKLNGFNFQNRYLVVLYHQPDKMAKSKEDLEARRESLAQLKQQHGID

SEQ ID NO: 9106 - protein, 479 aa, Schizosaccharomyces pombe
MTAPSATAFSSATTQPTTEGNASMRKRTIPVVPSVPERKWDPKAPKHIQEQPWTMQNWWRHLNWLHCMLIFGLPMIAIYGVFTTPLQTKTLIFAIIYYAYSGLGITAGYHRLWSHRAYKAKKPLEYFLAAGGAAAFEGSIRWWSRDHRAHHRYTDTDKDPYNVKKGFWYAHVGWMIILQNPRRIGRSDVSDLNSDPFVMFNHRHFLPIASFMAFIFPSLFCGLLWGDYRGGYFYAGVCRLVFVHHATFCVNSLAHLIGSQPFDDTNSARNHFITALVTLGEGNHNYHHAFPNDYRNGLRWYEYDPTKIFIYIASLFGLAYNLNTFPDNEIQKGIVQQKQKVLDRWRAKLNWGIPLEQLPVMEFEDFLEQSKTRPLVLINGVVHDMTGFEHPGGQGLLRSAFGKDATAAFNGGVYDHTNGAHNLLSTYRVAVVRGGMEVEVWKSGAGAQLPMKDTQGQKIVRVGEQITRIQPPIEAAAAN

SEQ ID NO: 9107 - protein, 545 aa, Piscirickettsia salmonis
MSAKEVRFGTGSRQKMLDGVNLLANAVKVTLGPRGRNVILEKSFGAPTITKDGVSVAKEIELSDKFENMGAQMVKEVASKSNDDAGDGTTTATVLAQAIIQEGVKSVAAGMNPMDLKRGIDKATIAAVAALKDLSTPCTDNKAIAQVGTISANSDEEIGSIIAKAMEKVPTDGVITVEEGSSLENELDVVEGMQFDRGYLSPYFVNKQEKMIAEIESPFILLVDKKISNIRELLPTLESVAKSGKPLFIIAEDVEGEALATLVVNNIRGIVKVCAVKAPGFGDRRKAMLEDIAILTGGTVISEEVGLDLEKATLEHLGTAKRIVVTKDNTTVIDGAGEQNAIEARVTQIRAQVEETSSDYDREKLQERVAKLSGGVAVIKVGAATEIEMKEKKDRVDDALHATRAAVEEGVVPGGGVALVRAMAAVKALDFANDEQAQGANILLRAMSAPLRQIVENAGSEAAVILDKIVNGEGNFGYNAATNEFGDMIEMGILDPTKVTRSALQNAASIAGLMITTEAMVAELPKEDSAGGAGMPDMGGMGGMM

SEQ ID NO: 9108 - protein, 137 aa, Zea mays
YRVVGSVAALLLLLAIVVPFTQTQTQSARDKAAMAEDAGPLVGGISDSPMGQENDLDVIALARFAVSEHNNKANALLEFENVVKVKKQTVAGTMHYITIRVTEGGAKKLYEAKVWEKPWENFKKLEEFKLVEDVPSA

SEQ ID NO: 9109 - protein, 526 aa, Burkholderia fungorum LB400
MRKNLKNIGLIAAGLATGVFATLQLSASAQQPASAASSAVAPLPLDQLRLFAEVFGQIKHEYVEPVDDKKLLTAAIKGMVSSLDPHSSYLDKTDYEELQEQTKGRFAGLGIEISSEDGLIKVISPIEDTPAFRAGIRPGDLITRINDKPVRGMTLDQAVKQMRGDPGTKVTLTIFRKTDDRTFPLTVTRAIIKVQSVKMKILAPGYAYVRITSFQERTTPDLAAKLQDIARQQPNLKGLVLDLRNNGGGLLQSAVGVAGAFLPPNSVVVSTNGQIPDSKQVYRDTYDNYRLQSFDSDPLKDEAPIFKTVPMIVLTNAYSASASEIVAGALQDQHRALIVGKTTFGKGSVQTVRPMTADTALRLTTAYYYTPSGRSIQNKGIRPDIAVDQYAEGDPDDALVTREVDYSNHLANTQDPNEKKEAEQREQERMDQLRQLEEQNDKKTPEQRQKDRERKPVEFGSADDFMLQQALNKLEGKPVQESKSLTERRLAQNKPPASASAPVAVKPTQPVPGASAPASAPATPSN

SEQ ID NO: 9110 - protein, 401 aa, Cryptococcus neoformans var. neoformans B-3501A
MSTSTRRHVPDDKLANHKADPNAAANAGQVQERTTKGSSSSAPRKVRFNVGNNYHVVDVIGEGAYGVVASAVHRPSGTKVAIKKIAPFDHSMFALRTLRELKLLKYFAEEGVSENIISVLDIIKPPSYDTFKEVYLVQELLETDLHRVIRTQDLSDDHCQYFLYQTCRALKALHSAEIIHRDLKPSNLLLNANCDLKVCDFGLARSTQTAFPAEGNNQGFMTEYVATRWYRAPEVMLSFRMYTKSIDVWSVGCILAEMLSGKPLFPGKDYHNQLALILDVLGTPTIDEFHAITSKRSKDYIRSLPFRKKRTFESIYPSANPLAIDFLRKTLTFDPRKRYTVEQCLAHPYLDAYHDPEDEPSAKPLPPSFFEFDMMKDDISREELKRLLYEEIMGFRPVLEG

SEQ ID NO: 9111 - protein, 463 aa, Thermobifida fusca YX
MSNDHLPEFPAGFWFGAATASYQIEGAVHADGRGPSIWDTYSHTPGLVLNGDTGDVACDHYHRYPEDVELLRRLGVDAYRFSIAWPRVMPTGSGDVNQRGLDFYDRLVDALLEAGITPVPTLYHWDLPQALEDAGGWRSRSTAEHFAAYTRAVVARLGDRIRHWITLNEPFCSAFLGYAVGRHAPGAREGTPALAAAHHLLLAHGLAVQELRAADAGEVGITLNPDRILPASDSAADRAAADRAETLHNRVWFDPLFAGRYPANEADVWGELADGSYRRDGDLEIIGQPLDFLGINYYRPLKVADGPLTEADPARRTAVDIRAHQQRFDGVRHTAMDWPVVPESFTDLLLDLTERYPNLPPIYITENGSAEHDVVSPDGRVHDTDRIAYLNDHLHALAAAIRAGVDVRGYFVWSLLDNFEWAFGYERRFGIVRVDYDTLERLPKDSYFWYQRLIEHHRARHRG

SEQ ID NO: 9112 - protein, 727 aa, Xanthomonas campestris pv. vesicatoria str. 85-10
MTYNVSSCMKAGLLALVLTTPMALLARADTALPAAATPDQATATKLVYGLLSDSRYAYRPRTLDEAMSKDVFKRYLETLDGGKQFFTQADIDSFAPLQAGVGDALRGGNLEPAFQVFSVYKKRVDQRVKYARDLLKQDFDFSGNDKFEYDRKDVPWAADDKQLDVLWRQSVMNDWLRLKLAGKKPDDIRKTLDKRYVALADSVKQLKGEDVFQFFVNAYTNAVDPHTDYFTPRTAETFNQQMSLSLEGIGAQLQKQDDMVVIREVIPGGPAAVDGTLKPGDRIVGVGQSKNGAIEDVIGWRIDDVVAKIRGSKDTQVRLEYIPAESGIDGKHRTVTLTRQKVRLAEQAAKGETITLPATGSEPQRRIGIIKLPGFYQDFEGRRRNATDYASATRDVAKLLAGFKTDKVDGVVLDLRNNGGGSLDEAIELTGLFIEQGPVVQVRESGGRVTVNGDSDPKVAWDGPLAVLINRGSASASEIFAGAIQDYGRGLVIGETSFGKGTVQNIVDLDRWPAAEGQRYGQVKLTIAQFFRVSGSSTQHKGVVPDIAFPASVDASEFGESTYDNALPWTRIAAAPHTQYGNFAPLLPKLQALHTARIATDKEFQWWEEDVKQFRDEKAKKYISLNEAERVAERQKQDQQRKDRQQIRKQLGLPLDPLAEDSDDGLTGNERDIVKDTAREKAAEKRPDPLLHESAAILADALGLLSQDKPLSAQVLPKSTAPGRWAD

SEQ ID NO: 9113 - protein, 469 aa, Arabidopsis thaliana
MEESNRSSTVLFDKYNIGRLLGTGNFAKVYHGTEISTGDDVAIKVIKKDHVFKRRGMMEQIEREIAVMRLLRHPNVVELREVMATKKKIFFVMEYVNGGELFEMIDRDGKLPEDLARKYFQQLISAVDFCHSRGVFHRDIKPENLLLDGEGDLKVTDFGLSALMMPEGLGGRRGSSDDLLHTRCGTPAYVAPEVLRNKGYDGAMADIWSCGIVLYALLAGFLPFIDENVMTLYTKIFKAECEFPPWFSLESKELLSRLLVPDPEQRISMSEIKMIPWFRKNFTPSVAFSIDETIPSPPEPPTKKKKKDLNEKEDDGASPRSFNAFQFITSMSSGFDLSNLFEIKRKPKRMFTSKFPAKSVKERLETAAREMDMRVKHVKDCKMKLQRRTEGRKGRLSVTAEVFEVAPEVSVVEFCKTSGDTLEYYLFCEDDVRPALKDIVWSWQGDDDEDDVTTNDNVDTNDNKINNVS

SEQ ID NO: 9114 - protein, 540 aa, Streptococcus agalactiae
MAKDIKFSADARSAMVRGVDILADTVFVTLGPKGRNVVLEKAFGSPLITNDGVTIAKEIELEDHFENMGAKLVSEVASKTNDIAGDGTTTATVLPQAIVREGLKNVTAGANPIGIRRGIETAVSAAVEELKEIAQPVSGKEAIAQVAAVSSRSEKVGEYISEAMERVGNDGVITIEESRGMETELEVVEGMQFDRGYLSQYMVTDNEKMVSELENPYILITDKKISNIQEILPLLEEVLKTNRPLLIIADDVDGEALPTLVLNKIRGTFNVVAVKAPGFGDRRKAMLEDIAILTGGTVVTEDLGLDLKDATMQVLGQSAKVTVDKDSTVIVEGAGDSSAIANRVAIIKSQMEATTSDFDREKLQERLAKLAGGVAVIKVGAATETELKEMKLRIEDALNATRAAVEEGIVSGGGTALVNVIEKVAALKLNGDEETGRNIVLRALEEPVRQIAYNAGYKGSVIIARLKQSEIGTGFNAANGEWVDMVTTGIIDPVKVTRSALQNAASVASLILTTEAVVANKPEPEAPTAPAMDPSMMGGF

SEQ ID NO: 9115 - protein, 365 aa, Mangifera indica
QMGLAENQLCFDLIEDWIRKNPYASICTAEGVDEFKEIANFQDYHGLPEFRKAVAKFMGKVRGGRVTFDPDRIVMGGGVTGANEQIIFCLADPGDAFLVPSPYYPAFDRDLGWRTGGEIVPVPCDSSTNFQITRDALEEAYEKAREANINIKGLIITNPSNPLGITLDRDTLKSLVSFIDEKNIHFVCDEIYAATLFCPPKFVSVAEVIQEMDCNLDLIHIVYSLSKDMGLPGFRVGIVYSYNDAVVSCIRKMSSFGLVSSQTQYLLASMLSDDEFVEKFLAESSKRLAKRYHIFTKRLEKVGINCLKGNAGLFFWMDLRHLLQQETVDAEMKLWGTILNDVKLNVSPGSSFHCQEPGWFRVCFA

SEQ ID NO: 9116 - protein, 286 aa, Triticum aestivum
  misc_feature (219)..(219): Xaa can be any naturally occurring amino acid
  misc_feature (228)..(228): Xaa can be any naturally occurring amino acid
  misc_feature (241)..(241): Xaa can be any naturally occurring amino acid
  misc_feature (251)..(251): Xaa can be any naturally occurring amino acid
  misc_feature (283)..(283): Xaa can be any naturally occurring amino acid
PAGYRYMEDEAEKLMAESFSKNFIDYEEYPQSADIQNRCVNMIGDLFHAPPGSSVGTSTVGSSEAIMLGVLAMKRRWKNRRIAEGKSTEHPNIVMSSAVQVCWEKATRYFEIDEKLVYCTPDRFVMDPEQAVDLCDENTIGMCAILGTTYTGEYEDIKAINDLLVERNLDVPIHVDAASGGFVAPFVVPDLEWDFRCEKVVSINVSGHKYGLVYPGGGXVIWRSPEFXPQELVFNINYLGXDQSSFTLTFXKGASQVIGQYYQLIRLGKHGYRAIMSNLTRTXDYL

SEQ ID NO: 9117 - protein, 306 aa, Hevea brasiliensis
MPSHGDLDRQIEHLMECKPLPEARGQTLCDQARAILVEEWNVQPVKCPVTVCGDIHGQFYDLIELFRIGGNAPDTNYLFMGDYVDRGYYSVETVTLLVALKVRYRDRITILRGNHESRQITQVYGFYDECLRKYGNANVWKYFTDLFDYLPLTALIESQIFCLHGGLSPSLDTLDNIRALDRIQEVPHEGPMCDLLWSDPDDRCGWGISPRGAGYTFGQDIAAQFNHTNGLTLISRAHQLVMEGYNWCQEKNVVTVFSAPNYCYRCGIMAAILEIGENMAQNFLQFDPAPRQIEPDTTRKTPDYFL

SEQ ID NO: 9118 - protein, 372 aa, Debaryomyces hansenii CBS767
MSNTKANVATFEGHRNLRFRLILATLAGKAVKITKIRSDDMDPGLKDYEVSFLRLLESVTNGSQIEISYTGTTVIYKPGIIIGGQVTHNCPTNKPIGYYLEPMLYLAPFSKKKFSVVFKGLTASDKTKDAGIEAIKWGLLPLMEKFGVREVSLHILKRGSPPLGGGEVHFMCNSLIPQPMTIHALESPKISAIRGVAYCTRVSPSTVNRIIDSARNILRPTGVEVNITADAWRGDNSGKSPGFGVTLVAELKKGWRILAEGVGSPGTLPEDLGERAAYELLDELTKSCVIGRNQILLSLCYMTIGKEDIGRLKLHKDQIDDNFVWALRDIKNVFGTEAFLKDGAEEAVPGEEDYMTLSLKGIGFTSASKKIA

SEQ ID NO: 9119 - protein, 528 aa, Porphyra purpurea
MSKQILYQDDARKALEKGMDILTEAVSVTLGPKGRNVVLEKKFGAPQIVNDGVTIAKEISLEDHIENTGVALIRQAASKTNDVAGDGTTTATVLASAIVKQGMRNVAAGSNPMAIKKGIEKATNFVVSKIAEYAKPVEDTTAIVQVASISSGNDAEVGKMIADAIDRVGREGVISLEEGKSTSTSLEITEGMQFEKGFISPYFVTDLDRMEVLQENPFILFTDKKITLVQQELVPLLEQIAKTSKPLLIIAEDIEKEALATIVVNKLRGILNVVAVRAPGFGDRRKSLLEDMSILTGGQVITEDAGFSLDTVQLDMLGKARRVVVTKDSTTIIADGHEATVKSRCEQIKRQIETSDSLYEREKLQERLAKLSGGVAVIKVGAATETEMKDKKLRLEDAINATKAAIEEGIVPGGGSTNVHISGELFVWAKNNLFEDELIGALIVQRALTYPLRRIAFNAGDNGAVVVEKVKTNDFCIGYDASNGKIVNMYDAGIIDPAKVARSALQNATSIAAMVLTTECIVVDKLEA

SEQ ID NO: 9120 - protein, 476 aa, Lycopersicon esculentum
MDLETSEISNYKSSAVLSKLASNEQHGENSPYFDGWKAYDNDPFHLVNNLNGVIQMGLAENQLSVDLIEEWIKRNPKASICTNDGIESFRRIANFQDYHGLPEFTNAIAKFMEKTRGGKVKFDAKRVVMAGGATGANETLILCLADPGDAFLVPTPYYPGFNRDLRWRSGVQLLPISCKSCNNFKITIEAIEEAYEKGQQANVKIKGLILTNPCNPLGTILDRDTLKKISTFTNEHNIHLVCDEIYAATVFNPPKFVSIAEIINEDNCINKDLVHIVSSLSKDLGFPGFRVGIVYSFNDDVVNCARKMSSFGLVSTQTQHLLAFMLSDDEFVEEFLIESAKRLRERYEKFTRGLEEIGIKCLESNAGVYCWMDLRSLLKEATLDAEMSLWKLIINEVKLNVSPGSSFNCSEVGWFRVCFANIDDQTMEIALARIRMFMDAYNNVNKNGVMKNKHNGRGTTYDLTPQMGSTMKMLLA

SEQ ID NO: 9121 - protein, 199 aa, Oryza sativa
MAAVSLRKSNARLPPEVNRVLYVRNLPFNISSEEMYDIFGKYGAIRQIRLGNAKDTRGTAFVVYEDIYDAKNAVDHLSGFNVANRYLIVLYYQPAKMSKKSDVKKKEEEITRLQEKYGLGSKTPSSAPDAPLELICNYVLRIKLWLCTSNMCYLLFLLGQQNLCNKMALANTSYSIARHIIVLQVTKTKGLGKLKGTTT

SEQ ID NO: 9122 - protein, 469 aa, Bacillus licheniformis ATCC 14580
MTEQTKKFPEGFLWGGAVAANQVEGAYNVGGKGLSTADVSPNGVMYPFDESMESLNLYHEGIDFYHRYKEDIALFAEMGFKAFRTSIAWTRIFPNGDETEPNEEGLEFYDRLFDELLKYNIEPVVTISHYEMPLGLIKKYGGWKNRKVIDCYEHYAKTVFTRYKEKVKYWMTFNEINMVLHAPFTGGGLVFEEGENKLNAMYQAAHHLFVASALAVKAGHDIIPDAKIGCMIAATTTYPMTPKPEDVLAAMENERRTLFFSDVQARGAYPGYMKRFFKENGITIEMAEGDEDILKENTVDYIGFSYYMSMVASTSPEDLAKTEGNLLGGVKNPYLESSEWGWQIDPKGIRITLNTLYDRYQKPLFIVENGLGAVDVVEEDGSIQDDYRINYLRDHLKEVREAIADGVDLIGYTSWGPIDLVSASTAEMKKRYGYIYVDRDNEGKGTLSRTRKKSFYWYKKVIETNGESL

SEQ ID NO: 9123 - protein, 429 aa, Prochlorococcus marinus subsp. pastoris str. CCMP1986
MNSSFNKFLIFKKWIIIIMICIFSTNFFYIPSADALSDSKQFVLDAWTLVNEGYYDPERLDELQWKRIRQKTLQKQIETSEEAYSAIEDMLKPLEDPFTRILKPKDYELLKTSNFGSEINGVGLQLGEDEITKEINVISTLAGSPAEEAGIISGDQIVKVDGISCSELGLANTASKLRGESGTKVLVQIKSISDETKEIDLERRSVDLRPVRTKRLRDDSHTIGYLRITQFSESVPKKIEEALQELKDKEVEGVILDLRNNSGGLVSSGIAVADSFLSEKPIVETKDRNGIKDAIISQKNTSFEGPMVTLVNKGTASASEILAGSLQDNNRSTLMGEQTYGKGLIQSLKSLGEDSGIAITVASYLTPQGNNIQGKGITPDKILGLPEAREYGNSEDKWVKNAEIFLNALFDENDVEDKVNELENKDIEN

SEQ ID NO: 9124 - protein, 392 aa, Annona sp. SM-1999
PYEVPMTAAGALQSYKLAAKAIARLQALPSGNLQKLIDTVVEEVFELTGYDRAMAYKFHDDDHGEVISEITKPGLEPYLGLHYPATDIPQAARFLFMKNKVRMICDCNAKPVKVYQDEKLKLELTLCGSTLRAPHSCHLKYMENMGSIASLVMAVVINESDNEDDNSMVEQQQQQQPKRKRLWGLVVCHNTTPKFVPFPLRYACEVLMQVFAIHVNKELELENQIREKHLRTQTLLCDMLMRDAPLGIVTQSPNIMDLVKCDGAALLYNNKFWRLGLTPSEAHMRHIVSWLNEYHMDSTGLSTDSLHDAGYPGALALGDAVCGMAAVRITSKDILFWFRTHTAAEIRWGGAKHDPSDKDDGRRMHPRSSFKAFLEVVKSSSFPWKDYEMDAI

SEQ ID NO: 9125 - protein, 341 aa, Annona sp. SM-1999
EPVNPADVPVTAGGALKSYKLAAKAISRLQSLPSGNIPLLCDVLVREVSELTGYDRVKAYKFHEDEHGEVIAECRRSDLEPYLGLHYPATDIPQASRFLFMKNKVRMISDCLSPPVKVIQGKGLAQPLSLCGSTLRAPHGCHAQYMANMGSISSLVMSVTIDEDNDDTCSEQQQKGRRLWGLVVCHHTSPRFVPFPLRYACEFLMQVFGIQLNKEVELAAQSREKHILQMQTMLCDMLLRDAPVGILSQSPNVMDLVNCNGAALYYQNQFWLLGTTPTEAQIRDIVGWLLEYHNSTTGLSTDSLVEAGYPGAAELGDDVCGMAAVRITSKDFLFWFRSHTA

SEQ ID NO: 9126 - protein, 365 aa, Escherichia coli CFT073
MSSEKLYSPLKVGAITAANRIFMAPLTRLRSIEPGDIPTPLMAEYYRQRASAGLIISEATQISAQAKGYAGAPGIHSQEQIAAWKKITAGVHAENGHMAVQLWHTGRISHASLQPGGQAPVAPSALSAGTRTSLRDENGQAIRVETSMPRALELGEIPGIVNDFRQAIANAREAGFDLVELHSAHGYLLHQFLSPSSNHRTDQYGGSVENRARLVLEVVDAGIEEWGADRIGIRISPIGTFQNTDNGPNEEADALYLIEQLGKRGIAYLHMSEPDWAGGEPYTDAFREKVRARFHGPIIGAGAYTVEKAETLIGKGLIDAVAFGRDWIANPDLVARLQRKAELNPQRAESFYGGGAEGYTDYPTL

SEQ ID NO: 9127 - protein, 390 aa, Aquilegia sp. SM-1999
PYEVPMTAAGALQSYKLAAKAIARLQSLPSGSIDRLCDTVVEEVFQLTGYDRVMAYKFHDDDHGEVVSETTKEGLPPYLGLHYPATDIPQAARFLFMKNKIRMICDCRAKHVRVLQDEKLPFELTLCGSTLRAPHSCHLQYMENMDSIASLVMAVVINDGDEEEGTVEGASQSRKRKRLWGLVVCHNTTPRFVPFPLRYACEFLIQVFAIHVNKEFELENQILEKNILRTQTLLCDMLMRNAPIGIVSQSPNIMDLVKCDGAALLYQNKIWRLGLSPSESHIRDIASWLSEYHMDSTGLSTDSLYDAGFPGALSIGDTVCGMAAVRINSKDMLFWFRSHTAGEIRWGGAKHDPGEKDDGRKMHPRSSFKAFLEVVKTRSFPWKDYEMDAI

SEQ ID NO: 9128 - protein, 392 aa, Aquilegia sp. SM-1999
DLEPVNPADVPVTAAGAMKSYKLAAKAISKLQSLPSGNIPFLCEVLVQEISDLTGYDRVMVYKFHEDDHGEVIAEWKISDLEPYLGLHYPATDIPQASRFLFMKNKVRMIWDCTAAPVKVIQDTNLPQPLSLGGSTLRAPHGCHAQYMANMGSVASLVMSVTINDDDDDEVVNGQQKGRKLWGLVVCHHTCPRFVPFPLRYACEFLIQVFSMQINKEVELARQLREKHILQTKTVLCDMLLRDAPIGIFTQSPNVMDLVKCNGAALYYHQKFWLLGVTPTEAQIRDIVEWLVEYHNASTGLSTDSLVEAGYPGASILGNAVCGMAAAKITSKDFLFWFRSHTANEIKWGGAKHDPTEKDDGWKMHPRSSFKAFLDVVKHRSVPWEDIEMDAI

SEQ ID NO: 9129 - protein, 293 aa, Brassica napus
VPPLQTLGISRRPTPSDAGESAKLIRQRYREAADLIKKGKMCCLFINDLDAGAGRMGGTTQYTVNNQMVNATLMNIADNPTNVQLPGMYNKEDNARVPIIVTGNDFSTLYAPLIRDGRMEKFYWAPTREDRIGVCKGIFRTDNVKDEDIVTLVDQFPGQSIDFFGALRARVYDDEVRKFVEGLGVEKIGKRLVNSREGPPVFEQPAMTLEKLMEYGNMLVMEQENVKRVQLADQYLNEAALGDANADAIGRGTFYGKAAQQVNIPVPEGCTDPQADNFDPTARSDDGTCVYNF

SEQ ID NO: 9130 - protein, 345 aa, Austrobaileya scandens
TGYDRVMAYRFHEDDHGEVVSEIRKSELEPYLGLHYPATDIPQAARFLFMKNKVRMICDCHAKSVTVHQDEKLQFDLTLCGSTLRAPHSCHLQYMANMGSIASLVMAVVVNEGEQDEEETAEPNQQPQLKRKRLWGLVVCHNTTPRFVPFPLRYACEFLIQVFAIHVNKEMELQNQLQEKNILRMQTLLCDMLLRDAPLGIVTQSPNIMDLVKCDGAAVLYGNKVWLLGVTPTESQIQDIASWLSESHMDSTGLSTDSLFEAGYPGALALGAKVCGMAAVKITLKDMLFWFRSHTAAEVRWGGAKHDPVDRDDGRRMHPRSSFKAFLEVVKSRSLPWKEYEMDGI

SEQ ID NO: 9131 - protein, 360 aa, Austrobaileya scandens
PFYAILHRIDAGLIIDLEPVNPADVPITAAGALKSYKLAAKAISRLQSLPSGNIGLLCDVLVQEVSELTGYDRVMAYKFHEDEHGEVIAEYRRSNLEPYIGLHYPATDIPQASRFLFMKNKVRMICDCFAPPIKVIQDKKLAQPLSLCGSTLRAPHGCHAQYMANMGSVASLVMSITVNDDDDETIGEQQNQQKGRKLWGLVVCHHTSSRFVPFPLRYACEFLIQVFGIQLNKEVELAAWMREKHILQMQTLLCDMLLRDAPVGIMTQSPNVMDLIKCDGAALYYGKQLWLLGTTPTEAQIRDIAGWLLEYHGGTTGLSTDSLMEAGYPAAAALGDGVCGMAAAKLTSKDFLFWFRSHTA

SEQ ID NO: 9132 - protein, 396 aa, Brasenia schreberi
PYEVPMTAAGALQSYKLAAKAIARLQSLPSGSVGRLIDTVVEEVHQLTGYDRVMTYKFHEDDHGEVVSEIRKPDLEPYLGLHYPATDIPQAARFLFMKNKVRMICDCRAKPVKVYQDENLKTDLTLCGSTLRAPHSCHLQYMDNMGSIASLVMAVVINEGEDEGDDEPEQNQGQQQQQQQKKKRLWGLVVCHNTTPRFVPFPLRYACEFLMQVFAIHVNKEVELENQMREKNILRTQTLLCDMLLRDAPLGIVTQSPNVMNLVKCDGAALLYGNKLWLLGQTPSESQMRDLAVWLSEYHRDSTGLSTDSLYEAGYPGALAIGDVVCGMAAVRITNSDMLFWFRSPTASEIRWGGAKHDPEEKDDGRRMHPRSSFKAFLEVVKTRSLPWKGFEMDAI

SEQ ID NO: 9133 - protein, 582 aa, Magnetospirillum magnetotacticum MS-1
MCGLAALFSYRADAPPPDAAELARMTGAMTRRGPDGEGVWSGAEGRVRLGHRRLSIIELGEPGAQPMIADDGKTAIVFNGEIYNYRALRLRLEQQGVRLRSHSDTEVILEGYRLLGPDILAQLRGMFALAIWDGERGGILAARDGLGIKPLYVADDGRTVRLASQVKALLAGGGIETAPDPAGHAGFFLWGHVPEPHTLYRSIRALKPGTWERWGLDGRRDSGAFFDLGAELRRPRQAPRADLKSALEDSVAHHLVADVPVGVFLSAGRDSTTLAAMAAKLGTGKVKSVTLAFEEFAGTPKDEAPLAELAARHYATEHITRRIPGGDFAACRDQILADMDQPTIDGVNVWFVARAARESGLKVALSGLGGDELFAGYDNFTTIPRIVSVLGPSGAIPGLGRGFRALAGHFVRPKLAGLLELGTTLPDAYLLRRGLFMPWELPQVMDADMARIGLEALAPRLHLKRAAAGLGDDVAAISALEMQFYMRNQLLRDADWAGMAHSLEIRVPLVDTHLLDAVLDLRAAGRTPGKADMAACADPGLPTAILERPKTGFFVPVAQWLGESSLRGWAKRVHAALCEETL

SEQ ID NO: 9134 - protein, 352 aa, Cabomba sp. SM-1999
DLEPVNPADMPSTAAGALKSYKLAAKAISRLQVLPSGNIGLLCDVLVREVSELTGYDRVMAYKFHEDEHGEVIAECKRPDLESYLGLHYPATDIPQASRFLFIKNKVRMICDCTAAPVKVIQNENLEPPLSLCGSTLRFPHGCHVQYMTNMGSIASLVMSVVINESDEATANDQPEAAATSEQPQKGRKLWGLVVCHHRKPRFIPYPLRYACEFLIQVFSVRLNKEVELAIQVREKHILRTQTVLCDMLLRDAPVGIVTQSPNIMDLVKCNGAALYYGKQFWLLGTTPTEAQIRDIIAWLHESHGSSTGLSTDSLMEAGYPRALVLGNAVCGMAAVKITSRDFLFWFRSHTA

SEQ ID NO: 9135 - protein, 390 aa, Calycanthus floridus
PYEVPMTAAGALQSYKLAAKAITRLQSLPSGSMERVVDTVVQEVFELTGYDRVMAYKFHEDDHGEVISEITKPGLEPYLGLHYPATDIPQAARFLFMKNKVRMICDCHAKPVKVCQDEKLTFDLTLCGSTLRAPHSCHLQYMENMGSIASLVMAVVINEGEEDDEVGISQQQQQRRKRLWGLVVCHNTTPRFVPFPLRYACEFLMQVFAIHVSKEIELENQLREKNILRTQTLLCDMLLRDALLGIVTQSPNIMDLVKCDGASLLYGNKMWRLGLTPTESQIHDIAMWVSEYHMDSTGLSTDSLYDAGYPKALSIGDVVCGMAAVRITAKDMLFWFRSHAAAEVRWGGAKHDPSDKDDGRRMHPRSSFKAFLEVVKTRSSPWKDYEMDAI

SEQ ID NO: 9136 - protein, 393 aa, Calycanthus floridus
DLEPVNPDDVPVTAAGALKSYKLAAKAISKLQSLPSGNISLLCDVLVREVSELTGYDRVMAYKFHEDDHGEVIAECRRSDLEPYLGLHYPATDIPQASRFLFMKNKVRMICDCLAPPVKVIQDKRLAQPLSLCGSTLRAPHGCHAQYMANMNSIASLVMSVMVHENDDRQEMSSSRKGRKELWGLVVCHHTTPRLSFPLRYACEFLIQVFGIQLNKEIELAAQMREKHILRTQTVLCDMLQRDAPVGIIRQTPNVMDLVKCDGAALYYRNQFWLLGTTPTDAQIRDIAEWLLEYHSSSTGLSTDSLMEAGYPGASVLGDAVCGMAAIRITSKDFLFWFRSHTAKEIKWGGAKHDPVDQDDDDRKMHPRSSFKAFLEVVKCRSLPWEDIEMDAI

SEQ ID NO: 9137 - protein, 568 aa, Secale cereale [sequence omitted]

SEQ ID NO: 9138 - protein, 389 aa, Streptomyces avermitilis MA-4680
MSGPDPFCEPRRFGRGAALTLLFASVLVAGAATGSFDEPDDSGRKASSARPAPASHREDVAEAAAEAAADGKSPVEAAERAVSRSGDRWGAVYSQGEYEEFEEALDGQYTGVGLWARRERDGRIEVSRVQSGSPAAAAGIREGDRLRTVDGENVAGKPVTDVVSLLRGDAGDAAAGTRVRLGLARGTHAWDETVRRARLSTDPVTVRRLADDVTVIKVAAFTKGSGDRVRAAVADAPHADGIVLDLRGNSGGLVTEAVTAASAFLDGGLVATYDVNGEQCALHADSGADTTRPLVALVDGGTMSAAELLTGALQDRGRAVVVGTRTFGKGSVQMPSRLPGGSVAELTVGHYRTPSGHSVDGRGITPDLEADTEALERAGTVLSGLGDPS

SEQ ID NO: 9139 - protein, 547 aa, Rickettsia rickettsii
MATKLIKHGSKAREQMLEGIDILADAVKVTLGPKGRNVLIEQSFGSPKITKDGVTVAKSIELKDKIRNAGAQLLKSAATKAAEVAGDGTTTATVLARALAREGNKLVAAGYNPMDLKRGMDLAVNAVVEEIKKSSKKINSQEEIAQVGTISSNGDKEIGEKIAKAMEEVGKEGVITVEEAKNFSFDVEVVKGMMFDRGYLSPYFVTNSEKMVAELENPFILLFEKKLSNLQPMLPILEAVVQSQRPLLIIAEDVEGEALATLVVNRLRGGLKVAAVKAPGFGDRRKAMMEDIAILTKGELITEDLGMKLENVSIKSLGTAKRVTISKENTVIVDGNGDKKNIEDRVLQIKSQIAETTSDYDKEKLQERLAKLSGGVAVLKVGGATEVEVKERKDRVEDALAATRAAVEEGVVAGGGVTLLHASQPLTKLKVENKDQQAGIEIVIEALKDPLKQIVENAGENGGVVVGKLLEHKDKNYGFNAQDMQYVDMIKAGIIDPAKVVRTALQDAASVASLIITTETLIVDEPSDKAEPMPMRGGMGGMGGMDF

SEQ ID NO: 9140 - protein, 502 aa, Oryza sativa
MMDGRSILMGRYEVGKQLGQGTFAKVYYARNLTTGQAVAIKMINKDKVMKVGLMEQIKREISIMRLVKHPNVLQLFEVIASKSKIYFVLEYAKGGELFNKIAKEGKLSEDSARRYFHQLINAVDYCHSRGVYHRDLKPENLLLDENENLKVSDFGLSALAESKRQDGLLHTTCGTPAYVAPEVLSRKGYDGAKADVWSCGVILFVLVAGYLPFHDPNLIEMYRKICRADFRCPRYFSAELKDLIHKILDSDPSTRISIPRIKRSTWYRKPVEINAKNSEAATTNSISSGVATTSGSAECSTSEENQGSLSLPNLNAFDIISLSTGFNLSGFFEDTHGHQEERFTTRQPVTTVLGKLKELAKRLKLKVKKKDNGVLRLAAPKEGKKGFLELDAEIFEVTPSFLLVELKKTNGDTMEYRKLVKEDIRPALKDIVWVWQGDEHLNSQSILQGEQQQSPLPPELPQDQLQPSLPQQEKQDMPEPPLLPQVPQEEVQTSIPAEQTKN

SEQ ID NO: 9141 - protein, 160 aa, Glycine max
  misc_feature (128)..(128): Xaa can be any naturally occurring amino acid
  misc_feature (145)..(145): Xaa can be any naturally occurring amino acid
NSARGIIETPIDIYIVMEYAKSGELFDYIVEKGRLQEDEARNIFQQIISGVEYCHSNMVVHRDLRPEKVLLDSKCNVKIAGFGWSNIIRDGHFLKTRCGSSNYAAPEVISGKLYVGPKVDVWSCGVIXYFLLCGSFPFDDENIPXLFNKIKGGIFTLSFH

SEQ ID NO: 9142 - protein, 411 aa, Nostoc punctiforme PCC 73102
MNKQVFRVGFSLLMAFWLAFGTLTQPAVALTGEQKLVSEVWRIVNRTYLDETFNHQNWAAVRQKVLEKPLTDSNASYAAIGKMLKSLDDPFTRFLDPEQYRSLKVNTSGELTGVGLQIVLNPETGKLEVVAPIAGSPADKAGIRPRDRILKIEGVSTKNLTLDEAATKMRGPSGSLVTLLIERDGEPETEIKLTRDRIALNPVVSELRVSAEGTSIGYLRLTQFNANASMELAHAISSLEKKGAAAYILDLRNNPGGLLQSGIEIARQWLDSGTIVYTVNRQGIQGSFEALGPALTNDPLVILVNQGTASASEILAGALQDNGRAQLVGETTFGKGLIQSLFELSDGSGLAVTIAKYETPQHRDINKLGIKPDKVISQDPINREQIGTEADLQYQAAVELLKKDLVVAGKA

SEQ ID NO: 9143 - protein, 406 aa, Azoarcus sp. EbN1
MVRKSAKLANVCYDIRGPVLIKAKQMEDEGHKIIKLNIGNLAAFGFDAPEEIQLDMIRNLPNSAGYSESKGIFAARKAVMHYTQQKHIKGVTLEDIYIGNGVSELIVMAMNALLNIGDEVLVPAPDYPLWTAAVSLSGGTPVHYICDEANEWLPDLDDMRARITPNTRAIVVINPNNPTGALYPDHILQGIVDIAREHGLIVYADEVYDKVLYDGATHRSMGSFSEDVLTILFNGLSKNYRSCGYRAGWMVVCGDKRHAQDYIEGLNMLASMRLCANVPGQYAIQTALGGYQSIDDLVAEGGRMRRQRDLAHELISAIPGVSCVKPKATLYMFPKLDPKLYPIEDDQAFIAELLEEERVLLVQGSGFNWPHPDHFRLVFLPHEDDLRDAIGRIARFLEQYRKRHAA

SEQ ID NO: 9144 - protein, 349 aa, Canella winterana
DFEPVKPYEAPMTAAGALQSYKLAAKAIARLQSLPSGSMKRLVDTVVQEVFDLTGYDRVMAYKFHEDDHGEVISEITKPDLEPYLGLHYPSTDIPQAARFLFMKNKVRMICDCHALPVKVYQDDKLTFDLTLCGSTLRAAHSCHSQYMANMGSIASLVMAVVVNEREEEDENSESSEQQQQQKKKRLWGLVVCHNTTPRFVPFPLRYACEFLMQVFAIHVNKELELENQIQEKNILRTQTLLCDMLMRSAPLAIVTQNPNIMDLVKCDGASLLYQSKIWRLGVAPTESQIRDIARWLSDCHMDSTGLSTDSLHDAGYPGALLLGDVVCGMAAVKINSKDMPFWFRSHTA

SEQ ID NO: 9145 - protein, 393 aa, Canella winterana
DLEPVNPTDVPVTAAGALKSYKLAAKSISRLQSLPSGNIQLLCDVLVREVSDLTGYDRVMAYKFHEDEHGEVIAECRRSDLEPYLGLHYPATDIPQASRFLFMKNKVRMICDCSAPPVKVIQDKRLAQSLSLCGSTLRAPHGCHAQYMANMGSIASLVVSVTVSEDDDETESEQQQKGRKLWGLVICHHTCPRFVPFPLRYACEFLIQVFGIQLNKEVDLASQIREKHMLRTQTMLCDMLLRDAPVGIVTQSPNVMDLVKCDGAALYYKNQFWLLGTTPTEAQIRDITNWLVEYHNSTTGLSTDSLAVAGYPGASVLGDAVCGMAAVKFTNKDLLFWFRSHTAKEIMWGGAKHDPVDKDDDGRKLHPRSSFKAFLEVVKRRSLPWEDVEMDAI

SEQ ID NO: 9146 - protein, 298 aa, Thermotoga maritima MSB8
MGSDKIHHHHHHMQVPKVTLNNGVEMPILGYGVFQIPPEKTEECVYEAIKVGYRLIDTAASYMNEEGVGRAIKRAIDEGIVRREELFVTTKLWVSDVGYESTKKAFEKSLKKLQLEYIDLYLIHQPFGDVHCAWKAMEEMYKDGLVRAIGVSNFYPDRLMDLMVHHEIVPAVNQIEIHPFYQRQEEIEFMRNYNIQPEAWGPFAEGRKNIFQNGVLRSIAEKYGKTVAQVILRWLTQKGIVAIPKTVRRERMKENISIFDFELTQEDMEKIATLDEGQSAFFSHRDPEVVKWICSLKR

SEQ ID NO: 9147 - protein, 391 aa, Chloranthus spicatus
PYEVPMTAAGALQSYKLAAKAIARLQSLPGGSMEKLCDTVVQEVFELTGYDRAMAYKFHEDDHGEVISETTKPGLEPYLGLHYPATDIPQAARFLFMKNKVRMICDCHAKPVKVFKMKKLAFDLTLCGSTLRAPHSCHSQYMVNMNSIASLVMAVVVNEGEEGDSSEPGQQQLQQKKKRLWGLVICHNTTPRFVPFPLRYACEFLMQVFAIHVNKELELENQIQEKNIFRTQTLLCDMLMRDAPLGIVSQNPNIMDLVKCDGAALLYNKKIWRLGLTPSESQIHDISFWLSENHMDSTGFSTDSLNDAGYPGAVAIGNAVCGMAAVWITSKDMLFWFRSHTAAEVRWGGAKHDPEDKDDNRRMHPRSSFMAFLEVVKTRSLPWKDAEMDAI

SEQ ID NO: 9148 - protein, 397 aa, Chloranthus spicatus
DLEPVNPADVPVTAAGALKSYKLAAKAISRLQSLPSGNISLLCDVLVREVSELMGYDRVMAYKFHEDEHGEVIAECRRVDLEPYLGLHYPATDIPQASRFLFMKNKVRMICDCSAAPVKVIQDKRLGQPLSLCGSTLRAPHGCHALYMANMGSIASLVMSVTINEDDDETKSDPQQQQQENRRKLWGLVVCHHTSTRFAPFPLRYACEFLLQVFSLQLNKEVELAAQLREKNMLRMQTLLCDMLLRDTPTGILTQSPNVMDLVKCDGAALYYRNQFWLFGTTPTDVQIRDMAEWLLECHDGSTGLSTDSLMEAGYPCASILGNAVCGMAAVKITSKDFLFWFRSHTAKEVKWGGAKHDPIDKDGDGRKMHPRSSFKAFLEVMKQRSLPWEDMEMDAI

SEQ ID NO: 9149 - protein, 379 aa, Gibberella zeae PH-1
MSTESKLWQPLKLGNVNLSHRIALAPMTRLRNDDDHLPLDSVIQYYSDRAGIPGTLVISEATGISKTAEAAPSTPGISSRDQVQRWKKVFDAVHEKGSYMFMQIWDLGRAGDPNYLKSRGYKYSSSSDIPMEGYPVAPEALTEKEIWEKIDEFRKAARNVIDAGGDGVEVHACHGYLIDQFISESVNNRTDKWGGSVENRARFLLEVVKAVTEEVGAQRTAIRLSPFATFQAAYTANPWDQFGYIIAELKEAQYKLAYISFVEPRGNPAQTDMTIHTLPGDNVNPWGDKKPSLDHFLEMWDNQSPVIVGGGYLPENVSAAVDGSYKGWDVVVAFGRWFTSNPDLVYRVKNGIPLTPYKREYFYAAKMRDLLKPPRPNGR

SEQ ID NO: 9150 - protein, 414 aa, Degeneria vitiensis
SGKPFYAIIHRVTGSLIIDFEPVKPYEVPMTAAGALQSYKLAAKAIAKLQALPSGSMEKLVDTIVQEVFELTGYDRAMAYKFHEDDHGEVISEVTKPGLEPYLGLHYPATDIPQAARFLFMKNKVRMICDCHAKPVEVYQDEKLTFDLTLCGSTLRAPHSCHLQYMENMDSIASLVMAVVINEGEDESGGPEQQQQQLKRKRLWGLVVCHNMTPRFVPCPLRYACEFLMQVFAIHVNKEFELENQIREKNILRTQTMPCDMLLRDAPLGIVTQSPNIMDLVKCDGAALLYNNKIWRLGFTPTESQIHDISIWLSEYHTDSTGLSTDSLRDAGYPDALALGDVVCGMAAVRISPKDMLFWFRSPTAAEVRWGGAKHDPCDKDDGRRMHPRSSFKAFLEVVKTRSLPWKDYEMDGI

SEQ ID NO: 9151 - protein, 393 aa, Degeneria vitiensis
DLEPVNPADVPVTAAGALKSYKLAAKAISRLQSLPSGNISLLCDVLVREVSELTGYDRVMAYKFHEDEHGEVIAESRRSDLEPYLGLHYPATDIPQASRFLFMKNKVRMICDCSAPPVKVIQDKRLAQPLSLCGSTLRAPHGCHTQYMANMGSISSLVMSVTINEDDDDMLSEQQQKGRKLWGLVVCHHTSPRFIPFPLRYACEFLIQVFGIQLNKEVELAAQMREKHILRMQTVLCDMLLRDTPVGIITQSPNVMDLVNCDGAALYYRNQFWLLGTTPTEAQIRDIAGWLVEYHDGTTGLSTDSLTEAGYPSAADLGDDVCGMATVKITSKDFLFWFRSHTGKEIKWGGAKHDPVDKDDDGRKMHPRSSFKAFLEVVKQRSLPWEDVEMDAI

SEQ ID NO: 9152 - protein, 388 aa, Drimys winteri
PMTAAGALQSYKLAAKAIARLQSLPGGSLKRLIDTVVLEVFELTGYDRVMAYKFHEDDHGEVISEVTKPDLEPYLGLHYPATDIPQAARFLFMKNKVRMICDCNAKPVKVYQDEKLTFDLTLCGSTLRAPHSCHLQYMENMGSIASLVMAVVINEREEQDENSGSEQQREQPRRKRLWGLVVCHNTTPKFVPFPLRYACEFLAQVFAIHVNKELELENQIQENNILRTQTLLCDMLMRAALLGIVTQSPSILDLVKCDGASLLYQNKIWRLGVAPTESQILDIALWLSEYHMDSTGLSTDSLQDAGHPGALSLGDVVCGMAAVRINSKDTLFWFRSHTAAEIRWGGAKHDPNQKDDGRKMHPRSSFKAFLEVVKTRSSPWADYEMDAI

SEQ ID NO: 9153 - protein, 568 aa, Candida albicans SC5314
MVLSKHIDALRLESQILKKTPQAQLRKEAFIDAYDSHKNIPQFEIPQNSSNEQLIYKYLSQELALDGIPTLNLASFVNTYVDDTSARLIQDNLTKNLADNDEYPSLIDIQTRCISILSNLWHAPGKVDKVTGNRVTNSIGTATTGSSEAIMLAGLALKKRWQLKRKAEGKSTDNPNILMATCAQVALEKFACYFDVENRLIPVTEESGHLIDVSKIKENIDENTIGIFVIMGSTFTGAFEPVEEISKLLDEVEKERGLDIRIHVDGASGGFVAPFIFPHLKWDFAVPRVDSINTSGHKFGLTSVGLGWVIWKDADLLPKELRFSLDYLGGVEETFGLNFSRPGFPVITQYYNFLSLGRQGYAKIFDGCMTNARLLSRFLEESKYFDVVSVIHHKLSDSEKKAQFTREVDDKKLDSKLYTINEEFKPGLPVVAFRFSKEVRDKYPELPQELLSTLLRKRGYIIPNYHLPPSENDKEILRVVVRNSLSLNLLERLIQDITGATELLIKAADSIADYVSTSGEHTDVENRERIHKLLAAIASGGVAEVKEEKHKKDNHQGSKNKKSYRGTC

SEQ ID NO: 9154 - protein, 398 aa, Candida glabrata CBS138
MPRTITFNIPKEYKLVDLVGEGSYGIVCSATHLPTGNKVAIKRIRFPDSPPSDDGQGVPRLEEDDEHDNIAKVALIRTIREIKILSHFNNHENIITIFEKIKPMQSINFKEIYLVQELMETDLSRILASSNTLTVDHIQYFLYQILRALKAIHSAKVIHRDLKPSNILLNSNCDLKICDFGLARTYDPDDDASTMNGNNVGFLTEYVATRWYRAPEIMLNFQDYSTAIDIWSCGCVLAEMLFRKPIFPGKDYHHQLLLILDTLGTPSPEDIEAINYGRAKEYILSLPHFPKKDWSQLLGTDNEMLLDILDKLMIFNPKRRITAEQALEHPFLATYHDPKDEPNFPPLNFKGDEFWQLDNCMETSNGYGTDDSNNLRANVTRRKLREILYQEMVTPAPR

SEQ ID NO: 9155 - protein, 394 aa, Drimys winteri
DLEPVNPVDVPVTAAGALKSYKLAAKAISKLQYLPSGNISLLCDVLVREVSELTGYDRVMAYKFHGDEHGEVIAECRRSDIEPYLGLHYPATDIPQASRFLFMKNKVRMICDCTARPVKVIQDKKLAQPLSLCGSALRAPHGCHAQYMANMGSIASLVMSVTISEDDDEASTEEQRQKGRKLWGLVVCHHVTPRFVPFPLRYACEFLIQVFGIQLNKEVELEAQLREKNMLRTQTMLCDMLLRDAPVGIVTQSPNVMDLVKCDGAALYYRNQFWLLGITPTEAQIRDIAEWLLEYHNSTTGLSTDSLMEAAYPGASILGDAVCGMAAVKITCKDFLFWFRSHTAKEIKWGGAKHDPGDKDGDGRKMHPRSSFKAFLDVVKQRSLPWEDVEMDAI

SEQ ID NO: 9156 - protein, 392 aa, Eupomatia laurina
PYEVPMTAAGALQSYKLAAKAIARLQALPSGSLEKLIDTVVQEVFELTGYDRAMAYKFHDDDHGEVISEITKPGLEPYLGLHYPATDIPQAARFLFMKNKVRMICDCYAKPVNVYQDEKLAFDLTLCGSTLRAPHSCHLQYMENMGSIASLVMAVVINDGEDEDESTGSGLQPPLLKKKRLWGLVVCHNTTPRFVPFPLRYACEFLMQVFAIHVNKELELENQICEKNILRTQTLLCDMLLRDAPLGIVTQNPNIMDLVKCDGVALLYDNKFWRLGLTPTESQMRDISAWLSEYHMDSTGLSTDSLYDAGYPGALALGDVVCGMAAVRITSKDMLFWFRSHTAAEVRWGGAKHDPNDKDDGRRMHPRSSFKAFLEAVKTRSLPWKDYEMDAI

SEQ ID NO: 9157 - protein, 247 aa, Gnetum gnemon
MGRGKIEIKRIENTTNRQVTFCKRRNGLLKKAYELSVLCDAEVALIVFSSRGRLYEFANNSVKRTIERYRKTCADNNQGGAIAESNAQYWQQEAVKLKQQIDVLNNQIRHYMGECLQSMTIKELKQLEGKLEKGLGRVRSKRNEKLLEDIDTLQRREDNLIRENEYIRNKIAECQSHQHANMLTAAAVEYDAIPAAYDSRNFMHANLIEAAAAHHHYAQQEQTALHLGSEHKYSVHYPDPQAHKFQT

SEQ ID NO: 9158 - protein, 393 aa, Eupomatia laurina
DLEPVNPADVPVTAAGALKSYKLAAKAISRLQSLPSGNISLLCDVLVRELSELTGYDRVMAYKFHEDEHGEVIAECRRLDLEPYLGLHYPATDIPQASRFLFMKNKVRMICDCSAPPVKVIQDKRLEQPLSLCGSTLRAPHGCHAQYMANMGTIASLVISVTINEDDDETPGEQQQKGRKLWGLVVCHHMSPRFVPFPLRYACEFLIQVFGIQLNKEVELAAQTREKHILRMQTMLCDMLLRDTPIGIVTQSPNVMDLVKCDGAALYYQNQFWLLRTTPTETQIRDIIGWLLEYHGDTTGLSTDSLTEAGYPGAADLGDDVCGMAAVKISSKDFLFWFRSHTAKEIMWGGAKHGPVDKDDDGRKMHPRSSFKAFLEVVKRQSLPWEDMEMDAI

SEQ ID NO: 9159 - protein, 883 aa, Oryza sativa (japonica cultivar-group)
MSSAANVMLAIHEKRTTPTDLYRPLRLYIASAYSEREAAAADDDLAAVRDLRADVEQPSLPDPSSLERRRDALLAYARALSLVEPRFPISSDRAHVHSLAFTWHDAFKTGKKASVASIHLEKAAVLFNLAAVYSQIALAADRATDVGIRTACGSFQSAAGAFAWMRESGVAAKAVAAGATTVDVTPECAAMLEKLMLAQAQECFFEKVIAGGKPPALCSKVARQVGIFYEEAYAALSAAPLSQHFDKTWVSHVQLKAAQFYADACYRCSLDLHEKEEIAQEIARLKIGISALADAKKVARGVAAPLLDSVNKLESNMKTNLERAMKENDRVYLMRVPDASSLGALPAASLVKPTSLAEVLDASKERLFSSLVPDGSMKALSKYTEMVDNIIRTQAEKLQQASEITRVRLKEMDLPDSILSLEGNITLPLDLKEDVEAVQISGGPAGLEAELQQLRDLSRVNQELLVQTEEMLQKEANEDAQFRTQFGSRWTRPQSSTLTKNIQDRLNLFASNLKTAGDSDSQIERGLKESYPLISILDRRPIESALPSISRPIMSLDGNEDAIVGALKQSLRQLESLGAQRAGLEDMLKEMKRKDDILPKLMAGVGSHDDLFKKEISKYDPVCAEIADNIVAQEQLLLQIQAQNEQFAAVFNLEDYKVARERCYKQIAAAVAKYRDIKKNINEGLNFYVTLQEAIGKIKQQCSDFIMTRNIQCREMIEDVQKKLAGFSFSSSSSQASMQRNTSVPPDQNSPSPPPPSSHAPHAQGPYGVPPGGDSRPGYSQPEQRPAYSQPYPPYGAPPQQPPYGAPSQQPPYGAPHPGHYQQPPHQQPPNHDYGQQAYPGGWRGQYYNPHQPQPQPQPPYPQPPYNAQGSYPPHQSSYYRPQ

SEQ ID NO: 9160 - protein, 109 aa, Arabidopsis thaliana
  misc_feature (85)..(85): Xaa can be any naturally occurring amino acid
  misc_feature (102)..(102): Xaa can be any naturally occurring amino acid
MASSMLSSTAVVTSPAQATMVAPFTGLKSSASFPVTRKANNDITSITSNGGRVSCMKVWPPIGKKKFETLSYLPDLSDVELAKEXFDYLLRNKWIPCVEFEXEHGFFVP

SEQ ID NO: 9161 - protein, 488 aa, Saccharomyces cerevisiae
DVREDRVVTNSTGNPINEPFVTQRIGEHGPLLLQDYNLIDSLAHFNRENIPQRNPHAHGSGAFGYFEVTDDITDICGSAMFSKIGKRTKCLTRFSTVGGDKGSADTVRDPRGFATKFYTEEGNLDWVYNNTPVFFIRDPSKFPHFIHTQKRNPQTNLRDADMFWDFLTTPENQVAIHQVMILFSDRGTPANYRSMHGYSGHTYKWSNKNGDWHYVQVHIKTDQGIKNLTIEEATKIAGSNPDYCQQDLFEAIQNGNYPSWTVYIQTMTERDAKKLPFSVFDLTKVWPQGQFPLRRVGKIVLNENPLNFFAQVEQAAFAPSTTVPYQEASADPVLQARLFSYADAHRYRLGPNFHQIPVNCPYASKFFNPAIRDGPMNVNGNFGSEPTYLANDKSYTYIQQDRPIQQHQEVWNGPAIPYHWATSPGDVDFVQARNLYRVLGKQPGQQKNLAYNIGIHVEGACPQIQQRVYDMFARVDKGLSEAIKKVAE

SEQ ID NO: 9162 - protein, 557 aa, Nostoc punctiforme PCC 73102
MANLTDFKLFAPRNKGAALIGSFSDWKEIPMSKSEDGYFRTKIKLEDGVYQYKFRIQTKSPNFAPDEWIDVIDPKATEVNETEKYGIVRIQDGQRIVDSYFWQHDEMPLPDNRELVIYEMHVADFTGDEVDSNERGKYLGIIAKLDYLCELGINAIELMPVNEYPGDYSWGYKVRHFFATESSYGSTEDLKRLIDECHGRGIRVFMDGIYNHTDEECPLILIDRNYWYYEHKHYPEDPANYWGPEFNYDFYDKNLNIQPAWEYIGDVVRFWIQEYHIDGIRFDAVRQLANFEFLNWLTKQAKNHAAPKQFYNIAEHIPDTNTVVKPDGPLDACWHESFRYFLVPYICGKSFELEQLKQILDPKQQGYAIATNVINYLATHDRERLLRELGNCGIFDAAAFERAKLAAVLLMTAMGIPMLWMAEEFGEYQQKSEDVTKPQKITWSLLLDDQNYDLFEYYQKLITLRQQTPALQSDNIKFFYENADDKVLAYSRWDEQNSHVVVVVNFSDRSLNQYKISDFPTTEDWRDWVGNREVKSGEDGLVTDLPSYTAKIFVLQT

SEQ ID NO: 9163 - protein, 555 aa, Thermobifida fusca YX
MLGRGGRLPPGKCRVGPAHWPSRLSSAEVSPTTRALSRHTGTSGPAPSRSLPAISTIKETDLTETNEALSTASNATGSTLDSGAPAASDRNSLSVGSNGPLLLHDVRLVETLAHFNRERVPERNPHAKGAGAFGVFETTEDVSQYTKAALFQKGARTEMLARFSTVAGEQGSPDTWRDVRGFALKFYTSEGNYDLVGNNTPIFFVRDPMKFPHFIRSQKRMPDTGLRDNNMQWDFWTLNPETAHQVTYLMGDRGLPRTWRHMNGYGSHTYMWINAKGEKFWVKYHFKTDQGIENMTNEEAERLAGVDADFHRRDLVEAIERGDYPSWTLYVQVMPYEDAKTYRFNPFDLTKVWPHSDYPLIKVGKMTLNRNPENFFAEIEQAAFAPSNLVPGIGVSPDKMLLGRVFAYADAHRARIGTNYFQLPVNKPRVKVNSYTFDGHMTYEHSGKAPVYAPNSYGRPWSDQTGPVEDSWEADGELVRSAYELHAEDDDFSQAGTLVREVFDDAQRDRLVETVADHLSKGVVEPVLSRAFQYWKNIDETIGERIEKRYHEIAR

SEQ ID NO: 9164 - protein, 622 aa, Prochlorococcus marinus str. MIT 9312
MCGITGIISFQSSIDPQNIHNMNETLMHRGPDHRDIWINEYSTVFLGHTRLSILDLSDNGNQPFHSKDGRFHLTFNGEIYNYKNLKDYLKTNGISNFKSNSDTEVLIELIALRGITNASKMLNGMFAFAVWDSLEKKIHLVRDRFGEKPLFYTLQKDTLYFGSEIKSILKIPTISKIINKEALSHYLRFNYIKNPLTIYKDIYKLEPGHILSIDQNITYKKYSYKNKNKKTIKLANQKEAEDLLQNQIIKSCLSRTISDVPIACFLSGGIDSSLVTSIIQRNSKQRIKTFTIGFDDQSIDESNYAEKIANFLGTDHTTINIEEKELLNNIDLQSEIYGEPFADQSSIATNILCKYASRDVKVCLSGDGGDEMFIGYDRYYKVNQLRLFLKAIKFYKKFKTIDRILEVLIHKIESNKNFSIKIDKIIKLISLLSDANDDNIYEKFNSLYRDQYFPLTPQNNQKHYIYKDLKNIQEMCEYDFETYLPDCILTKVDRASMHNSLEVRAPFLDHEIPEIIDSINPTYKKKLLNRKFILKKLLNKYLPKNIYERPKKGFSAPLNNWIKGPLKELTLDYLSIESLKKHNLLDIDIIERIKYEHYSGIRSWHNQIWNLLIFQQWYNKNF

SEQ ID NO: 9165 - protein, 538 aa, Chromobacterium violaceum ATCC 12472
MAAKEVRFHDNARERIVNGVNVLADAVKVTLGPKGRNVLLARSFGAPHITKDGVSVAKEIELKDPFENMGAQMVKEVASKTADVAGDGTTTATVLAQAIVQEGMKYVASGMNPMDLKRGIDKAVHAVIKELQTLSKPVTNSKETAQVAALSANSDEAIGKIIADAMDKVGKEGVITVEDGKSLDNELAVVEGMQFDRGYLSPYFITDPEKQTAVLEDPLVLLYDKKISNIRDLLPVLEQVAKAGKPLLIVAEDVEGEALATLVVNSMRGILKVAAVKAPGFGDRRKAMLEDIAILTGGTVIAEETGLTLEKAGLAELGSAKRVEIGKENTTIIDGAGDKAKIDARVQAIRAQIDAATSDYDREKLQERVAKLSGGVAVIRIGAATEVEMKEKKDRVDDALHATRAAVEEGIVAGGGVALLRARAHIKELKGDNPDQDAGIQIVLRALEAPLRAIAANAGDEPSVIVNKVLEGKGNHGYNAASGQFGDLVEMGVIDPTKVTRTALQNAASIASLILTTDATVAEAGQDSKAKAPAELDY

SEQ ID NO: 9166 - protein, 254 aa, Legionella pneumophila str. Paris
MTILPISAFSDNYIWTFIDKIAGVLDCVDPGEAGPIIRFAQSNQLTLRTILLTHHHYDHIGGVDLLIKQWPSCKVYGPIDERINNVTHPIKQGQSVQVGSLHFHILFNPGHTSTHISYYEPQQGWLFCGDTLFSAGCGRVFDGTIEELHESLLLFKKLPRNTKVFCAHEYTLQNLKFAHTVEPCNSSVINYMQQILKQPSPCTLPSNIDLELSINPFLRTDKEQVKQYALSHGANSSDSLDVFKVLRNQKNSFK

SEQ ID NO: 9167 - protein, 564 aa, Yarrowia lipolytica CLIB122
MCGIFAAYKLPDVAEYKTHALQLSKRIRHRGPDWSGNCSKNNTIICHERLAIVGLDTGAQPITSPDESIVLGVNGEIYNHRILRKEFPDYKFKTHSDCEPIIPLYEKYGIDAPKKLDGMFAFVLYDSNKDRIIAARDPIGITTLYMGRSYKNPQTVWFASELKCLVDDCDEIKAFPPGHVYDSDTDKITRYFEPSWWDGSKIPTKRVDYKELREALEAAVRKRLMSEVPYGVLLSGGLDSSLIASIAARETRRAAPEKTVNQDLAGVDEQGHLTNSSGSRLHSFSVGLPGAPDLLAAQKCAEFIGTIHHEYTFTVQEGLDALRDVIYHLETFDVTTIRASTPMYLLSRKIKAGGVKMVLSGEGSDEVFGGYLYFGAAPSPEAFHTECVQRVKNLHYADCLRANKSTMAWGLEARVPFLDKQFLEVAMNIDPKDKIIDKDHIEKYSIRKAFDTSDEPGAEPYLPDEILWRQKEQFSDGVGYSWIDGLKDAAENTITDEQLKNPKPHWGADVPKTKEAYWYRCMFDELFPQPAAATTVMRWIPKADWGCAEDPSGRYVKSHSAHKQ

SEQ ID NO: 9168 - protein, 148 aa, Brassica napus
MDPYRVRPSSAHDSPFFTTNSGAPVWNNNSSLTAGTRGPILLEDYHLLEKLANFDRERIPERVVHARGASAKGFFEVTHDITHLTCADFLRGPGVQTPVIVRFSTVIHERGSPETLRDPRGFAVKFYTREGNFDLVGNNFPVFFVRDG

SEQ ID NO: 9169 - protein, 505 aa, Helicobacter pylori
MVNKDVKQTTAFGAPVWDDNNVITAGPRGPVLLQSTWFLEKLAAFDRERIPERVVHAKGSGAYGTFTVTKDITKYTKAKIFFKVGKKTECFFRFFTVAGERGSADAVRDPRGFAMKYYTEEGNWDLVGNNTPVFFIRDAIKFPDFIHTQKRDPQTNLPNHDMVWDFWSNVPESLYQVTWVMSDRGIPKSFRHMDGFGSHTFSLINAKGERFWVKFHFHTMQGVKHLTNEEAAEVRKYDPDSNQRDLFNAIARGDFPKWKLSIQVMPEEDAKKYRFHPFDVTKIWYLQDYPLMEVGIVELNKNPENYFAEVEQVAFTPANVVPGIGYSPDRMLQGRLFSYGDTHRYRLGVNYPQIPVNKPRCPFHSSSRDGYMQNGYYGSLQNYTPSSLPGYKEDKSARDPKFNLAHIEKEFEVWNWDYRADDSDYYTQPGDYYRSLPADEKERLHDTIGESLAHVTHKEIVDKQLEHFKKADPKYAEGVKKALEKHQKMMKDMHGKDMHHTKKKK

SEQ ID NO: 9170 - protein, 414 aa, Thiobacillus denitrificans ATCC 25259
MTADKKPRLRTIQKSTKLDNVCYDIRGPVMARARQMEEEGQRIIKLNIGNPAPFGFEAPEEIVQDVILNLPNASGYSDSKGLFAARKAIMHETQRKGIAGVTIDDIIVGNGVSELIVMAMQALLNNGDEVLVPAPDYPLWTAAVSLGGGKPRHYLCDEGAGWLPDLDDIRAKITPSTRAIVIINPNNPTGALYPTELLREILEIARQHQLIVYADEIYDKVLFDGVVHTSIASLADDLLIVTFNGLSKNYRACGYRSGWLVVSGDKRHAKDYLEGLNMLASMRLCSNVPGQHAIQTALGGYQSINDLVAPSGRLTRQRDLAHELLTLIPGVSCVKPKAAMYLFPRLDPKLYPIHDDQKFILNLLEEERVLVVQGTGFNWPRPDHLRVVFLPHEEDLTEAIGRMSRFLDRQRAHR

SEQ ID NO: 9171 - protein, 478 aa, Listeria monocytogenes str. 4b F2365
MEHQKRSPFPKDFLWGSASAAYQIEGAWDADGKGKSVWDEYVRIPGTTFKGTNGDVAVDHYHRYKEDVKLMADAGLKAYRFSIAWTRIFPNGKGEVNEAGLKFYDNLIDELLKYDIEPLVTLYHWDIPQALFDEYGGWESRQVIEDFTNYSTTLFKRYGDRVKYWVSLNEQNIFVGMGYGQALHPPKVSDPKRMYAVNHIANLANASVIKAFHEIVPDGKIGPSFAYTPHYPIDTDPKNVQAADDAEELNSYFWMDMYAFGRYPKAVWKYLEENDIAPVIEDGDMELLSSAKPDFMGVNYYQSATVAYNPLDGVGQNNEMNFTGKKGSTKETGVPGVYKKVVNPFVKTTNWDWTIDPKGLQIALRRINSRYALPILITENGLGEFDKLVDGEVNDDYRIDYLSAHATAIRDAISDGVDMLGYCTWSFTDLLSWLNGYQKRYGFVYVDRDVEDDAPMTRIPKKSYYWYKQVIETNGADL

SEQ ID NO: 9172 - protein, 396 aa, Hedycarya angustifolia
DLEPVNPADVPVTAAGALKSYKLAAKAISKLQSLPSGNISVLCDVLVREVSELTGYDRVMAYKFHDDEHGEVIAECRRSNLEPYLGLHYPATDIPQASRFLFMKNKVRMICDCSAPPVKVIQDKSLAQPLSLGGSTLRAPHGCHAQYMANMGSIASLVMSVTINEDDDETSSGSEQQQQKGRKLWGLVVCHHTSPRFVPFPLRYACEFLIQVFGIQLNKEVELAAQMREKHILRTQTVLCDMLLLDAPVGIITKTPNVMDLVKCDGAALYYLNQFWLLGTTPTEAQIRDIVSWLQEYHNGSTGLSTDSLMEANYPGAFVLGDAVCGMAAVRITSKDFLFWFRSHTAKEIKWGGAKHNIVDKDDDGRKMHPRSSFKAFLEVVKRRSLPWEDIEMDAI

SEQ ID NO: 9173 - protein, 542 aa, Triticum aestivum
  misc_feature (407)..(407): Xaa can be any naturally occurring amino acid
MAYGLKPKAPSVPPPGEENDQPIDRPRPKPLSIRGRPPLHSGFGEAAHGIWPVKMDGNTRGGGHSEALKNYNLGKTLGHGTFGKVMIAEHKLTGQKVAIKILNRHQMEIMEMVEKAKREIKILRSFIDFIHPHIIRVYEVIETPKDIFVVMEYCQNGDLLDYIVEKGRLQEDVARRIFQQIISGVEYCHTNMVVHRDLKPENLLLDSKYNVKLADFGLSNVMHDGHFLKTSCGSINYAAPEVISGELYAGPEVDVWSCGGGFYILPNHLSDLAMDLIPRMLIVDPMKRITICEIRDHPWFQNRLPPRRAVPPPDTAQQAKMEIDEDTLQEVANLGYDKDHVCESLCNRLQNEATVAYYLLLDNRFRATSGYLGADYLQSMGRSFNQFTSSESASPSTRQYLPASNGXSKAVALRPYYPVQRKWALGLQSPAHPREIMIEVLKALQELNVRWKKNGHHNMKCRWCPGFPQVSDMLDANHSFVDGSTIMDIGDANGRLPAVIKFEIQLYKTKDDKYLLDMQRVTGPQLLFLEFCAAFLTNLRVL

SEQ ID NO: 9174 - protein, 398 aa, Hernandia lychnifera
DFEPVKPYEVPMTAAGALQSYKLAAKAIARLQSLSSGSMQKLVDTVVEEVYELTGYDRVMAYKFHDDDHGEVISEIKKPDLEPYLGLHYPATDIPQASRFLFMKNKVRMICDCNMKPVKVYLDEKLTYDLTLCGSTLRAPHSCHLQYMANMGSIASLVMAVVINEGEEERIAQKLHNHHHSQKRKRLWGLVVCHHTTPRFVPFPLRYACEFLMQVVAIHVNKEFELENQIQEKNILRTQTLLCDMLLRDAPLGIVTQSPNIMDLVKCDGAALLYGNKIWKLGTTPTELQIRDISLWLSEYHMDSTGLSTDSLYDAGYPGALSLGDAICGMAAVTITPKDFLFWFRSHTAAKVRWGGAKHDPTDKDDGRTMHPRSSFKAFLEVVKTRSLPWKDYEMDAI

SEQ ID NO: 9175 - protein, 345 aa, Hernandia lychnifera
DLEPVNPAEVPVTAAGALKSYKLAAKAISLLLSLPSGNISVLCDVLVCEVSDLTGYDRVMAYKFHEDEHGEVIAECCRPDLEPYLGLHYPATDIPQASRFLFMKNKVRMICDCSAFPVKVVQDKRLAQPLSLCGSTLRAAHGCHAQYMANMDSVASLMMSVTIIEDDDEVGSDPQQQQKGRKLWGLVVCHHTSPRFVPLPLRYACELLIQVFGMQLNKEVELANQMREKHILRMQAVPCDMLLRDTPVGIMTRSPNIMDLVKCDGAALYYHNQFWLLGINPTEAQIRDIARWLLERHNGSTGLSTDSLMEAGYPGASFLGNAVCGMAAVRISSNDFLSWFRSHTA

SEQ ID NO: 9176 - protein, 677 aa, Xanthomonas campestris pv. campestris str. 8004
MATWLILVGELLVSLGLMVAILLRPQVSHTRRLIGMLLDYTCTGAIMAIQGEPASPLYAVCMWVTIGNGLRYGSNYLRAATAMGSLCFLGAILISPYWKANPYLSWGLLLGLIAVPLYFDSLLRAMTRAVREARHANQAKSRFLANMSHEFRTPLNGLSGMTEVLATTRLDAEQKECLNTIQASARSLLSLVEEVLDISAIEAGKIRIDRRDFSLREMIGSVNLILQPQARGRRLEYGTQVADDVPDLLKGDTAHLRQVLLNLVGNAVKFTEHGHVLLRVTRVSGSAEDAVRLRFDVEDTGIGVPMDMRPRLFEAFEQADVGLSRRYEGTGLGTTIAKGLVEAMGGSIGFKENQPSGSVFWFELPMAIGEPLKSSTVRVPTGALVDAPEELESSNIIAFSNPFLRHRARVRSMRMLVADDHEANRMVLQRLLEKAGHKVLCVNGAEQVLDAMAEEDYDAVIVDLHMPGMNGLDMLKQLRVMQASGMRYTPVVVLSADVTPEAIRACEQAGARAFLAKPVLAAKLLDTLADLAVSTRQLATPATTVQVATSFEGVLDSSVLDELAALGMGEEFERQFVRQCLDDAQNCVGDIERDGTCSDWEQLRESAHALRGVASNLGLAQVASSGGELMRMADWQLQAEWRLRLSTLREQLKAGKDALDARVQGVKDGECSPRSNE

SEQ ID NO: 9177 - protein, 392 aa, Houttuynia cordata
  misc_feature (248)..(248): Xaa can be any naturally occurring amino acid
DLEPVNPSDVPVTAAGALKSYKLAARAISRLQSLPSGDISLLCDVLVREVSDLTGYDRVMAYKFHEDEHGEVVAECKRADLEPYLGLHYPATDIPPASRFLFMKNKMRMICDCLAQPVKVIQDKRLPQPLSLAGSTLRAPHGCHAQYMSNMGSIASLVMSVVVSEGDDDSNNGEKTGRKLWGLVVCHHTSPRFIPFPLRYACEFLIQVFAIQLSKEVELAAQMKEKHILRMQTVLCDMLLRDAPMGIXTQSPNVMDLVKCDGAALYYRCQCWLLGTTPTENQIRDLAEWLLQYHNSSTGLSTDSLVDAGYPGAHELGDAVCGMAAIRITSRDFLIWFRSHTAKEIKWGGEKHDPSDKDAFESKMNPRTSFKTFLEVVKRRSLPWEDVEMDAI

SEQ ID NO: 9178 - protein, 311 aa, Triticum aestivum
MATHFVLNTGAKIPSVGLGTWQSDPGVVGEAVYAAVKAGYRHIDCARAYNNEKEVGLALKKLFEEGVVKREDLFITSKLWCGHHAPEDVPEALGDSLNDLQLDYLDLYLIHWPFRVKKGTSIGNPENFLPPDIPATWGAMEKLHDAGKARAIGVSNFASKKLGDLLAVARIPPAVDQVECHPGWQQSKLHSFCQSAGVHLSAYSPLGSPGSTWMNGNVLKEPVVLSIAEKLGKTPAQVALRWNIQMGHSVLPKSVSEERIKQNLAVYDWSIPEDLLAKFSEIKQARLLMGNFIVNKDSVYKTHDELWDGEI

SEQ ID NO: 9179 - protein, 414 aa, Idiospermum australiense
SGKPFYAIIHRVTGSLIIDFEPVKPYEAPMTAAGALQSYKLAAKAITRLQSLPSGSMERLVDTVVQEVFELTGYDRVMAYKFHEDDHGEVISEITKPGLEPYLGLHYPATDIPQAARFLFMKNKVRMICDCHARPVKVYQDEKLTFDLTLCGSTLRAPHSCHLQYMENMDSIASLVMAVVINEGEEDDEVESAQQQQQKRKRLWGLVVCHNTTPRFVPFPLRYACEFLMQVFAIHVSKEFELENQLREKNILRTQTLLCDMLLRDAPLGIVTQSPNIMDLVKCDGAALLYGSKIWRLGLTPTDSQIQDIAMWLSEYHMDSTGLSTDSLYDAGYPKALSIDDVVCGMAAVRITAKDMLFWFRSHAAAEVRWGGAKHDPSDKDDGRRMHPRSSFKAFLEVVKTRSLPWKDNEMDAI

SEQ ID NO: 9180 - protein, 395 aa, Idiospermum australiense
DLEPVNPADVLVTAAGGLKSYKLAAKAISKLQSLPSGNISLLCDVLVREVSELTGYDRVMAYKFHEDEHGEVIAECRRSDLEPYIGLHYPATDIPQASRFLFRKNKVRMICDCLAPPVKVIQDKRLAQPLSLCGSTLRAPHGCHAQYMANMNSIASLVISVTVHEDDNETGSEQQQQPKGRKLWGLVVCHHTSPRFVPFPLRYACEFLIQVFGIQLNKEIELAAQMNEKHILRTQTVLCDMLQRNAPVGIITQTPNVMDLVKCDGAALYYRNQFWLLGTTPTEAQIRDIVEWLMEYHSSSTGLSTDSLMEAGYQGAAILGDAVCGMAAIRITSKDFLFWFRSHTAKEIKWGGAKHDPVDQDDDGRKMHPRSSFKAFLEVVKRRSLPWEDVEMDAI

SEQ ID NO: 9181 - protein, 390 aa, Lactoris fernandeziana
PYEVPMTAGALQSYKLAAKAISRLQSLPSGSMERLVDTVVQEVFELTGYDRIMAYKFHEDDHGEVISEVTKPDLEPYLGLHYPATDIPQASRFLFMKNKVRMICDCRAKPVKVYQDEKLSFDLTLCGSTLKAPHSCHLQYMENMGFIASLVMAVVVNEGEEEVDSQESSQQQAPKRKRLWGLVVCHNTTPRFVPFPLRYACEFLMQVFAIHVNKEFELENQILEKNILRTQTLLCDMLFRDAPMGIVTQSPNIMDLVKCDGAVLLYQNKVYRLGLAPTESQIHDIAQWLSEYHKDSTGLSTDSFHDAGYTRARSLGDIVCGMAAVRINSGDMLFWFRSHTAAEVRWGGAKHDPDEKDDGRRMHPRSSFKAFLEVVKYRSFPWKDYEMDAI

SEQ ID NO: 9182 - protein, 341 aa, Lactoris fernandeziana
DLEPVNPSDVPVTAAGALKSYKLAAKAISRLQSLPSGNIPLLCDVLVREVSDLTGYDRVMAYKFHEDEHGEVIAECKRSDLEPYLGLHYPATDIPQASRFLFTKNKVRMICDCSARPVKVIQDKRLAQPLSLGGSTLRAPHGCHAQYMLNMGSVASLVMSVTISEDDDDSASEQKGRKLWGLVVCHHTTPRFIPFPLRYACEFLIQVFGIQLNKEVELAAQVREKHILRTQTVLCDMLLRNAPVGIMTKSPNVMDLVNCDGAALYYRNRCWFLGTTPTESQIRDLAEWLLQYHNSTTGLSTDSLVEAGYPCAHGFGEAVCGMAAVKITSRDFLFWFRSHTA

SEQ ID NO: 9183 - protein, 540 aa, Frankia sp. CcI3
MPKIIAFDEEARRGLERGMNQLADAVKVTLGPKGRNVVLEKKWGVPTITNDGVSIAKEIELEDPYEKIGAELVKEVAKKTNDVAGDGTTTATILAQALVREGLRNVAAGANPLGLKKGIEVAVERVSEELSKQAKEVETKEQIASTASISAGDSAIGGLIAEALDKVGKEGVVTVEESNTFGLELELTEGMRFDKGYISPYFVTDADRQEAVLDDPYILIVNSKISAVKDLLPLLEKVMQTGKPLAIIAEDVEGEALATLVVNKIRGTFKSAAVKAPGFGDRRKAILGDIAILTGGQVISEDVGLKLESTSLDLLGRARKIVVTKDETTVVEGAGDPDQIAGRVSQIRNEIEKSDSDYDREKLQERLAKLAGGVAVIKVGAATEVELKEKKHRIEDAVSNAKAAVEEGIVAGGGVALLQASITAFEKLDLSGDEATGANIVRLALEAPIKQIAFNSGLEGGVVVEKVRNLPTGHGLNAATGEYVDLIGTGIIDPAKVTRSALQNAASIAGLFLTTEAVIADKPEKNPAPAVPGGGGDMDF

SEQ ID NO: 9184 - protein, 393 aa, Lemna gibba
DLEPVNPSDVPVTAAGALKSYKLAAKAISRLQSLPSGNISLLCDVLVREVKDLTGYDRVMAYKFHEDEHGEVVSECRGSDLEPYLGLHYPATDIPQASRFLFLKNKVRMICDCSAQPVRIIQDKRLSQPLSLCGSTLRAPHGCHAQYMKNMGSIASLVMSVTINDEGVDHGGEEQQKSRKLWGLVVCHHSSPRFIPFPLRYACEFLMQVFAIQVNKEVEIAAQKREKHILKTQTFFCDMLLREAPVGIFTQSPNVMDLVKCDGAALYYRNQFRLLGVTPTEAQIKDLCDWLMDWHNNTTGLSTDSLSEAGFPGASSLGDAVCGMAAIKITGKDFVFWFRSHVAKEIKWGGAKDESVGRSEEGRKLYPRSSFQAFLEIVKRRSLPWEDVEMDAI

SEQ ID NO: 9185 - protein, 397 aa, Gibberella zeae PH-1
MTLSKTTTTVNPESRLFKPIQVGNAKLDHRIVMAPLTRYRNDDNHVVKPFVERYYAERASAPGTLVIAEATGVSMQDTGMRQGPAFVTDEQVAGWTKVISAVHEKKSFWAQQIWGQGRASDPEYQKERGFKYRSSSAVPIEEGAPAPEAMTEEEIQQFIQDMVATSRRVIDAGGDIVEVHAAHGYLIDQFTSDSINKRTDKWGGSVENRARLLLEVIKAVSAEVGPEKVAIRLSPYATFQGSESSDVKEQYTYIVSELKKIGALAYLSLVEARGDPAKLLAPDQDASTDSKTLDFILDIWDNTSPVIVAGNYSPESAAEVLDGHYSKWDVLVAFGRHFIANPDFVWRVKHGVELTKYDRTTFYVRGSEIGYNDYPFSQEYVNEQRAWAVKNLKMHAK

SEQ ID NO: 9186 - protein, 672 aa, Shewanella sp. MR-7
  misc_feature (49)..(49): Xaa can be any naturally occurring amino acid
MSFPHLLEPLDLGFTQLKNRVLMGSMHTGLEEEKGGFEKLAAFYKERAXGGVGLIVTGGISPNLRGRLTPHACQLSFPWQVGKHRIVTQAVHEADGKICMQILHAGRYGYHPFSQAPSKIKSPITPFTPSAMSSRQVRATIKDYASSAALAKRAGYDGVEVMGSEGYLINQFISSRTNTRTDEWGGSFEKRAQFPIEIVNAIRAKVGNDFIIIFRLSMLDLVDNGSTWDEVVQLAKWLEHAGVSIINTGIGWHEARVPTIATSVPRGAFAWVTEKLKKSVSVPLIATNRINTPEIGEQIIASGQADMVSMARPFLADPEFVNKAAANTPELINTCIGCNQACLDHTFSLKRATCLVNPRACYETEINFLPTHNKKRIAVMGAGPAGMAFSVYAAMRGHEVALFEAKSEVGGQFNLARKIPGKEEFNETIRYFLNQIKLHKIDLRLNTRLDAKVLESETFDEIVIASGVVPRELSLPGFDSPKVVDYQQVLTGQATIGNKVALIGAGGIGFDMAHYLCESESSTLNPEKWLKQWGIDKQYQHAGGLAEPEVDNSEHRQVYLLQRKTSKMGQGLGKTTGWIHRLVLKQHDVKMKTGVSYDKFDDAGLHIRVGEQTEVLAVDNVILCAGQESNRTLVDEMKATGIPVHLIGGVDVAAELDAKRAIRQGAELAMRL

SEQ ID NO: 9187 - protein, 351 aa, Xanthomonas campestris pv. vesicatoria str. 85-10
MATMAAHFLHRLPVPMSRPSLTRFLIEEQHAGRIDAELRQLITIVSRACKRISIAVSKGTLGGVLGDAGTGNVQGEAQKKLDVLSNDILLEANAWGGHLAACASEEMDHSQPVPDQYPSGDFLLLFDPLDGSSNIDVNVSVGTIFSVLRAPKGTEKPGDEHFLQPGTQQVAAGYCIYGPSTMLVLTLGHGTHAFTLEREEGSFLLTQANMRVPEDTAEYAINMSNQRHWEPAMQAYVGDLLAGKDGARGKDFNMRWIASMVADVHRILTRGGIFIYPWDKKDPSKPGKLRLMYEANPMSMLVEQAGGAATTGRERILDIQPTQLHQRVPVFLGSKNEVAEATRYHLDADKA

SEQ ID NO: 9188 - protein, 133 aa, Gibberella zeae PH-1
MVNPPKQGQPSYELYKKEYDGIFTGLQERATALHKAFSQMEGVECAEPQGSMYLFPTINLPAKAAEAAKAEGRSADEFYCMRLLEATGICVVPGSGFGQKENTLHFRTTFLAPGTEWVGRIVKFHNEFLDKYR

SEQ ID NO: 9189 - protein, 547 aa, Campylobacter rectus
MAKEIFFSDEARNRLYEGVRKLNDAVKVTMGPRGRNVLVQKSFGAPAITKDGVSVAKEIELKDALENMGAGLVKEVASKTNDEAGDGTTTATVLAHSIFKEGLRNITAGANPVEVKRGMDKQAAAIIAELKNLSRKVTDKKEIAQVATISANSDSAIGGLIADAMEKVGKDGVITVEEAKSIQDELNVVEGMQFDRGYLSPYFITNAEKMQVELQSPYILLFDKKITNLKDLLPVLEQIQKTGKPLLIIAEDIEGEALATLVVNKLRGVLNISAVKAPGFGDRRKAMLEDIAILTGGEVVSEELGRTLESATLSDLGQASSVIIDKDNTTIVNGAGEKSAIDARIIQIKAQIAETTSDYDKEKLQERLAKLSGGVAVIKVGAATETEMKEKKDRVDDALSATKAAVEEGIVIGGGAAFIKAGAKVDLNLSGDEAIGADIVRRALTAPLRQIAENAGFDAGVVANSVSVSKDDNYGFNAATGEYVDMFKAGIIDPVKVERIALQNAVSVASLLLTTEATISELKEDKPMPAMPDMSGMGGMGGMGGMM

SEQ ID NO: 9190 - protein, 248 aa, Oryza sativa
  misc_feature (117)..(117): Xaa can be any naturally occurring amino acid
  misc_feature (194)..(194): Xaa can be any naturally occurring amino acid
HLLVPGIRPLWPGSSPLGGGEVFLRVPNIKSTLKAANWADEGMVKRIRGVSFSTRVSPQIENRIIYAARGIFNRFIPDVPIFTDHRSGSAGGRSAGYGVSVIAETTTGCLLSADATXASMLLKEIAPRGVVDSAHQGLLFILCALSPPDVSKVRVGQLTPYAIETLRNIRDFLDVQFIIKPDPNSHTVTLPCVXGAGVNNLSRKTSSNPRLSIPSRLTLSAQHGPRNPRLILNPSDSPTSRLQLAHPD

SEQ ID NO: 9191 - protein, 219 aa, Arabidopsis thaliana
MAQQSLIYSFVARGTVILVEFTDFKGNFTSIAAQCLQKLPSSNNKFTYNCDGHTFNYLVEDGFTYCVVAVDSAGRQIPMSFLERVKEDFNKRYGGGKAATAQANSLNKEFGSKLKEHMQYCMDHPDEISKLAKVKAQVSEVKGVMMENIEKVLDRGEKIELLVDKTENLRSQAQDFRTTGSQMRRKMWLQNMKIKLIVLAIIIALILIIVLSVCHGFKC

SEQ ID NO: 9192 - protein, 336 aa, Oryza sativa
  misc_feature (250)..(250): Xaa can be any naturally occurring amino acid
MESIARYLSRDLPYELSADDVYLTSGCAQAIEIICSVLARPGANILCPRPGYLFHEDARVNGMEVRYFDLLPESGWEVDLDGVQELADKNTVAMVIINPGNPCGNVYTSEHLAKVAETAKKLGIFVIADEVYAHLTFGQNKFVPMGVFGSVAPVLTLGSISKRWVVPGWRLGWIVTSDPNGVFQRTKVVESIQSYLDISADPATFIQGAIPQLIENTKEEFFEKTVDVLRQTADICWEKLKGISCITCPXKPEGSMFVMVKLDLSCLQGIKDDMDFCCQLAKEELVILLPGCAVGYKNWLRITFAIEPSSLEDGIDRLKSFCSRHSKPKVHRSLET

SEQ ID NO: 9193 - protein, 471 aa, Oenococcus oeni PSU-1
MVAISLLITESEYISHGRIKEGVFWGNSTSSMQTEGAWNEGGKGMSVYDIKPSGPDNSDWKVAIDEYHRYPEDVNIMQNLGMNFYRFQISWSRVQPEGEGDFNQTGIDFYNRLIDNLLKAGIEPMICLYHFDMPLALAKKYNGFLNQKVVSAFFEYAKKMIEKFGDRVKYWITFNEQNCFSLSSAFESSGYLTGKKTLRELYQIQHNTILAHCLVANYIHQSKPDLKIGGMEAFQEAYPYSPLPTDVEVTRKYKEFVDYNLLRVFVEGKYSTEVIGFMKENHLEDILKPSDLLEIGNNRSDFISFSYYTTSTLDSSQIPVGSIPNYYGQMGYKKNPYLLSNEWGWQIDPQGFYGILIDLYNRTHLPIFPIENGIGVRENWDGQNQIDDSYRVQYHRSHIRALKKAVRDGANVIGYLGWGLIDIPSSKGNVDKRYGVVYVNRTNHEILDLKRVPKKSYYWLQKVIKSNGTEL

SEQ ID NO: 9194 - protein, 404 aa, Streptococcus pneumoniae TIGR4
MKEYNKSSKLEHVAYDIRGPVLEEAMRMRANGEKILRLNTGNPAEFGFTAPDEVIHDLIMNARDSEGYSDSKGIFSARKAIMQYCQLKKFPNVDTDDIYLGNGVSELIVMSMQGLLDNGDEVLVPMPDYPLWTAAVSLAGGNAVHYICDEAVEWYPDIDDIKSKITSNTKAIVLINPNNPTGALYPKELLLEIIEIARQNDLIIFADEIYDRMVMDGHVHTPVASLAPDVFCVSMNGLSKSHRIAGFRVGWMVLSGPKTHVKGYIEGLNMLSNMRLCSNVLAQQVVQTSLGGHQSVDELLLPGGRIYEQRNFIYNAIQDIPGLSAVKPKAGLYIFPKIDRNMYRIDDDEQFVLDFLKQEKVLLVHGRGFNWQEPDHFRIVYLPRVDELAQIQEKMTRFLKQYRR

SEQ ID NO: 9195 - protein, 398 aa, Kluyveromyces lactis
MSFMNFEPKPLADTDIFKPIKIGNTELKHRVVMPALTRMRALHPGNVPNPDWAVEYYRQRSQYPGTMIITEGAFPSAQSGGYDNAPGVWSEEQLAQWRKIFKAIHDNKSFVWVQLWVLGRQAFADNLARDGLRYDSASDEVYMGEDEKERAIRSNNPQHGITKDEIKQYIRDYVDAAKKCIDAGADGVEIHSANGYLLNQFLDPISNKRTDEYGGSIENRARFVLEVVDAVVDAVGAERTSIRFSPYGVFGTMSGVSDPVLVAQFAYVLAELEKRAKAGKRLAYVDLVEPRVTSPFQPEFEGWYKGGTNEFVYSVWKGNVLRVGNYALDPDAAITDSKNPNTLIGYGRAFIANPDLVERLEKGLPLNQYDRPSFYKMSAEGYIDYPTYEEAVAKGYKK

SEQ ID NO: 9196 - protein, 391 aa, Magnolia x soulangeana
DFEPVKPYEVPMTAAGALQSYKLAAKAIARLQALSSGSMEKLVDTVVQEVFELTGYDRVMAYKFHEDDHGEVISEITKPGLEPYLGLHYPATDIPQAARFLFMKNKVRMICDCNAKPVKVYQDEKLTFDLTLCGSTLRAPHSCHSQYMENMSSIASLVMAVVINEGVDEEEGMEPAQQEQQQLKRKRLWGLVVCHNTTPRFVPFPLRYACEFLMQVFAIHVNKELELENQIQEKNILRTQTLLCDMLLRDALVGIRTQNPNIMDLVKCDGAALFYNNKIWRLGLTPTDSQMRDISVWLSEYHMDSTGLSTDSLYDAGYPGALALGDVVCGMAAVRINPKDMLFWFRSHTAAEVKWGGAKHDPSDKDDGRRMHPRSSFKAFLEVVKTKSLPW

SEQ ID NO: 9197 - protein, 450 aa, Zea mays
MDIKDMKTRGKTLTERYELGKLLGKGAFGKVHYGRDLESNQDVAIKIMDKDRVLKAGLSEQVKCEITTMRLVTHKNIVRLHEVMATRNKIYIIMEYAKGGELFEKIKRSDRLTEADTHKYFQQLIDALDHCHSRGVYHRDLKPENLLLDENGDLKVSDFGLSAFSESRRTDGLLHTVCGTPVYIAPEVIKKTGYDGAKSDIWSCGVVLFVLAAGYLPFQGPNLMEIYRKIHDRDFRCPSWFSHKLKRLLYKILNPNPSMRPSIQEIKESTWFRKGPREISAVNEKVLSENATTTNAAPVLPSRRKEIAHEDMKSLVATNLNAFEIIALSAGLDLSGLFIKECRKETRFTSDKPALSIIAKLEDVAKALNLRIRKKDNNTISIQGRKEGGNGVLKFDTQIFEITPSCHLVQIKQTSGNLLEYEKLLEEGIRPGLKDVVSAWHGDDLQQKQK

SEQ ID NO: 9198 - protein, 358 aa, Magnolia x soulangeana
PFYAIVHRIDIGLVIDLEPVNPADVPVTAAGALRSYKLTAKAISRLQSLPSGNISLLCDVLVREVSELTGYDRVMAYKFHEDEHGEVIAECRGSDLEPYLGLHYPATDIPQASRFLFMENKVRMTCDCLAPPVKVIQDKKLAQPLILCGSTLRAPHGCHSQYMANMGSIASLVMSVTINEDDDDDTSVSNGRRRKLWGLVVCHHTSPSFVPFPLRYACEFLVQVFGIQLNKEVELPAQMREKHILRMQTVFCDMLLRDAPVGIITQSPNVMDLVKCDGAAFYYRNQFRLLGTTPTEAQIRDIAGWLLEYHDGTTGLSTDSLTEAGYPGAADLGDDVCGMAAIKITSKDYLFWFRSHTA

SEQ ID NO: 9199 - protein, 389 aa, Nelumbo nucifera
PYEVPMTAAGALQSYKLAAKAIARLQALPSGCMDRLCDTVVQEVFELTGYDRVMAYKFHEDDHGEVVSEITKPGLEPYLGLHYPATDIPQAARFLFMKNKVRMICDCRAKHVKVLQDEKLPFDLTLCGSTLRAPHSCHLQYMENMDSIASLVMAVVVNEGDEEGEASGSSQQQKRKKLWGLVVCHNTTPRFVPFPLRYACEFLIQVFAIHVNKEIELENQILEKNILRTQTLLCDMLMRDALLGIISQSPNVMDLVKCDGAALLYKNKIWQLGTTPTEFQIHDIASWLSEYHMDSTGLSTDSFYDAGFPGALSLGDAVCGMAAVRITSKDMLFWFRSHTAAEVRWGGAKHDPDEKDDGRRMHPRSSFKAFLEVVKTRSLPWKDYEMDAI

SEQ ID NO: 9200 - protein, 391 aa, Nelumbo nucifera
DLEPVNPADVPVTAAGALKSYKLAAKSISRLQSLPSGNISLLCDVLVREVSDLTGYDRIMVYKFHEDEHGGVVAECRRPDLESYLGLHYPATDIPQASRFLFMKNKVRMICDCLAPPVKVIHDKKLAQPLSLCASTLRVPHGCHAQYMANMGSIASLVMSVTINDDDNEMESDQPKGRKLWGLVVCHHTSPRFVPFPLRYACEFLVQVFGIQLDKEVELAAQLREKHILKTQTLLCDMLLRNAPVGIFTESPNVMDLVKCDGASLYYKNKFWLLGITPTEAQIRDIAGWLLEHHDGSTGLSTDSLMEAGYPGASVLGDAVCGMAAIKITSKDFLFWFRSHTAKKIKWGGAKHDPVVKDGGRKVHPRSSFKAFLEVVKRRSLPWEDVEMDAI

SEQ ID NO: 9201 - protein, 580 aa, Oryza sativa
HFLSSSSPLNPQFLLLPRQSARLRVLLSIPVSAMSSSSSSSSRGALAAAAVPSLSADEAGAAADEAFLRYTSPSMRRSGGGGVAIVWFRNDLRVLDNEAVVRAWAASDAVLPVYCVDPRISAGSTHYFGFPKTGALRAQFLIECLEDLKRNLTKQGLDLLIRHGKPEDILPSIAKAVTAHTVYAHKETCSEELLVEHLVRKGLEQVVIPQGGASNQKKPRNPKLQLIWGATLYHVDDLPFSVNNLPDVYTQFRKAVESKSSVRNCSKLPPSLGPPPGSGLDEIGGWGTVPTLESLGLSMTKSEKGMHFVGGESAALGRVHEYFWKKDQLKVYKETRNGMLGPDYSTKFSPWLASGSLSPRYICEEVKRYEKQRIANDSTYWVLFELIWRDYFRFISAKYGNSIFHLGGPRNVESKWSQDQALFESWRDGRTGYPLIDANMKELLATGFMSNRGRQIVCSFLVRDMGIDWRMGAEWFETCLLDYDPASNYGNWTYGAGVGNDPREDRYFSIPKQAKTYDPDGEYVAYWLPELRSIAKERRNFPGASYIKQVVPLKFDGGHQKRDQQFNRQRRPGHMYRRQK

SEQ ID NO: 9202 - protein, 415 aa, Nymphaea odorata
GKPFYAIVHRVVSGLVMDFEPVKPSELPITAAGALQSYKLAGKAISRLQSLPGGSITRLCDTVVEEVHQLTGYDRVMTYKFHDDDHGEVVSEIRKPDLEPYLGLHYPATDIPQAARFLFMKNKVRMICDCRAKPVKVYQDENLKTDLTLCGSTLRAPHSCHLQYMENMSSIASLVMAVVINEGEDEGEDETDPNQRSQKRKRLWGLVVCHNTSPRFVPFPLRYACEFLAQVFAIHVNKEVELENQNALKKNILRTETLLCDMLLRGSPLGIVSQTPNIMDLVKCDGAAFLYGSKLYLLGRTPAESQIRDIAIWLSEYHKDSTGLSTDSLCEAGYPGALAIGSPVCGMAAVRITANDMLFWFRSHTASEIRWGGAKHDPEEKDDGRRMHPRCSFKAFLEVVKTRSLPWKDFEMDAI

SEQ ID NO: 9203 - protein, 155 aa, Zea mays
MSLVRRSSVFDPFSVDLFDPFDSMFRSIVPSSSSAAAAASETAAFASARIDWKETPEAHVFKADLPGVKKEEVKVEVEDGNVLLISGQRSREKEDKGDKWHRVERSSGQFVRRFRLPENAKTEEVRAALENGVLTVTVPKAEVKKPEVKSIQISG

SEQ ID NO: 9204 - protein, 407 aa, Nymphaea alba
PFYGILHRIDVGLVIDLEPVNPTDVPVTAAGALKSYKLAAKAISRLQALPSGNIGLLCDVLVREVSELTGYDRVMAYKFHEDHHGEVIAECKKPDLEPYLGLHYPATDIPQASRFLFMKNKVRMICDCTAPSVKVIQDKQLEAAVELCGSTLRSPHGCHAQYMVNMGSIASLVMSVVIMNHDEEPANDNPQKGSKLWGLVVCHHTSPRFIPFPLRYACEFLIQVFAVQLNKEVELAAQLREKHILRTQTVLCDMLLRDAPVGIVTPSPNVMDLVKCDGAALYYGKQFWLLGTTPTETQVRDIAGWLYECHGGSTGLSTDSLMEAGYSGAVALGDAACGMAAVKITYRDFLFWFRSHTAKEIKWGGAKHDTVDKDAGKRMHPRSSFKTFLEVVKHRSHPWENAEMDAI

SEQ ID NO: 9205 - protein, 432 aa, Methanocaldococcus jannaschii DSM 2661
MRNPIIDVGAKELSYEIREIVDVAKKIEEFGINITWENIGDPVAKGEKIPDWIKDIIAEIVKNDCSYAYCPTKGLLETREFLAEQVNKRGGVQITAEDIIFFNGLGDAIAKIYGLLKRQVRVINPSPSYSTHSSAEASHAGSPPVTYFLDPYNYWYPDIDDLEKRIKYNPAVSGILVINPDNPTGAVYPKKILNEIVDLANEYDLFIICDEIYCNLVYNGKKQHLLCEVIDDVCGLSLKGISKELPWPGARCGWIEIYNADKDEEFKKYVESIYKAKLIEVCSTTLPQMAIPRIMGHRNYKKYLEERNRFFEKRSNTAYKKLKDLDGVIANKANGAFYMSVVFEDNYLNGNNSIKIENEKLKEFIEHQIKDASIDKKFVYYLLASTGICVVPLTSFCSQLNGFRVTLLERDDEKFEWIFDTLAEKIDEFLKT

SEQ ID NO: 9206 - protein, 448 aa, Piper nigrum
SGKPFYAIVHRVTGSLIVDFEPVKPLEVPMTAAGALQSYKLAAKAISRLQSLPSGGMERLVDTVVQEVFELTGYGRVMAYKFHEDDHGEVISEVTAPDLDPYLGLHYPATDIPQAARFLFMKNKVRMICDCHAKPVKVYQDEKLPFDLTLCGSTLRAPHSCHLHYMANMGSIASLVMAVVINEGACSSATDHAVEQHSSSSSSSASYAAATATAAAAGGGGGSNIDTTSATSRRKMLWGLVVCHNTKPRFVPFPLRYACEFLMQVFAIHVNKELELERQIREKNILRTQTLLCDMLLRDAPMGIVNQSPNIMDLIKCDGAALLYKQQVFPLGVAPSDAELRQLARWLSSSHRDSTGLSTDSLHDAGYPNASCLGNVVCGMAAVKITPSDLLFWFRRHTAAEVRWGGAKHHPTDRDDGKRMHPRSSFKAFLEVVKTRSLPWQNYEMDAI

SEQ ID NO: 9207 - protein, 469 aa, Arabidopsis thaliana
MGLLSKKASCNTHGQDSSYFWGWEEYEKNPYDEIKNPDGIIQMGLAENQLSFDLIESWLAKNPDAANFQREGQSIFRELALFQDYHGLPSFKNAMADFMSENRGNRVSFNPNKLVLTAGATPANETLMFCLADPGDAFLLPTPYYPGFDRDLKWRTGAEIVPIQCKSANGFRITKVALEEAYEQAQKLNLKVKGVLITNPSNPLGTTTTRTELNHLLDFISRKKIHLISDEIYSGTVFTNPGFISVMEVLKDRKLENTDVFDRVHIVYSLSKDLGLPGFRVGVIYSNDDFVVSAATKMSSFGLISSQTQYLLSALLSDKTFTKNYLEENQIRLKNRHKKLVSGLEAAGIECLKSNAGLFCWVDMRHLLKSNTFEAEIELWKKIVYEVKLNISPGSSCHCNEPGWFRVCFANLSEETLKVALDRLKRFVDGPSPTRRSQSEHQRLKNLRKMKVSNWVFRLSFHDREPEER

SEQ ID NO: 9208 - protein, 341 aa, Piper nigrum
DLEPVNPADVPVTAAGALKSYKLAAKAISRLQSMPNGDIALLCDVLAREVSDLTGYDRVMAYKFHEDEHGEVIAECKRSDLEPYLGLHYPATDIPQASRFLFMKNKVRMICDCLAPPVKVVQDKRLGQPLSLAGSTLRAPHGCHSQYMSNMGSIASLVMSVMVCEGDEDSNGEKTARKLWGLVVCHHTSPRFIPFPLRYACEFLIQVFAIQLSKEVELAAQVKEKHVLRMQTVLCDMLLRDAPMGIMTQSPNVMDLVMCDGAALYYHSQCWLLGATPTENMVRDIAEWLQQYHGTSTGLSTDSLVEAGYPGAHELSDAVCGMAAITITNRDFSFWFRSHTA

SEQ ID NO: 9209 - protein, 394 aa, Sagittaria sp. Mathews 383
PYEVPMTAAGALQSYKLAAKAISRLQSLPGGSMQKLCDTVVQEVFELTGYDRVMAYKFHEDDHGEVVSEVTKPGLDPYLGLHYPATDIPQAARFLFMKNKVRMICDCRAKPVKVYQDEKLAFDLTFCGSTLRAPHSCHLQYMENMDSIASLVMAVIVNEGDEEDEVLGSRAQQQQQQQQRRKRLWGLVVCHNRTPRFIPFPLRYACEFLMQVFAIHVNKEFELENQMREKNILRTQTLLCDMLFRDALLGIISQNPNIMDLVRCDGAALVYQSKIWRLGMAPTESQICDIAAWLSEYHMDSTGLSTDSLHDAGYPGVLALGDSVCGMAAARITSKDILFWFRSHTAAEIRWGGAKHDPADEDDGRRMHPRSSFKAFLEVVKTRSMPWKDYEMDA

SEQ ID NO: 9210 - protein, 397 aa, Sagittaria sp. Mathews 383
DLEPVNLSDVPVTAAGALKSYKLAAKAISRLQSLSSGNISLLCDVLVREVRDLTGYGRVMAYKFHEDEHGEVISESRRSDLEPYLGLHYPATDIPQASRFIFMKNKLRMICDCTAQPVKVIQDKKFTQPLSLCGSTLRAPHGCHAQYMANMGSIASLVMSATISDEDEDDASSGQQRKRRKLWGLVVCHLTSPRFVPFPIRYACEFFMQVFAIQLNKEVELAAQTMEKYIFRTQTFLCDMLLRDAPVGIFTQSPNAMDIVKCDDAALYYKNQFWLLGITPAEGQIRGIAGWLRDCHNTTTGLSTDSLTAFSEAGYRGASTLGDAVCGMTAIKFTSRDFIFWFRSHTAKEIKWRGAKHDPVDKDDDGRKMHPRSSLKAFLDVVKRRSLPWEDVEMDAI

SEQ ID NO: 9211 - protein, 544 aa, Bartonella bacilliformis
MAAKEVKFGRDARERLLRGVDILADAVKVTLGPKGRNVVIDKSFGAPRITKDGVSVAKEIELENKFENMGAQMLREVASKTNDIAGDGTTTATVLGQAIVQEGVKAVAASMNPMDLKRGIDAAVEAVVADLFKKAKKIQTSEEIAQVATISANGAEDIGKMIADAMEKVGNEGVITVEEAKTAETELEVVEGMQFDRGYLSPYFVTNSEKMMVDLDDPYILIHEKKLSNLQSLLPVLEAVAQSGKPLLIIAEDVEGEALATLVVNKLRGGLKIAAVKAPGFGDRRKAMLEDIAVLTSGQVISEDVGIKLENVTLEMLGRAKKVHVSKETTTIVDGAGQKSEINARVSQIKAQIEETTSDYDREKLQERLAKLAGGVAVIRVGGSTEVEVKEKKDRVDDALNATRAAVEEGIVPGGGTPLLRAAKALSIKGKNPDQEAGIGIIRRALQAPARQIAHNAGEEAAVIVGKVLENCSDTFGYNTATAQFRDLISFGIVDPVKVVRSALQNAASIASLLITTEAMVAEVPKKEAAAPAMPGGGMGGMDF

SEQ ID NO: 9212 - protein, 613 aa, Xanthomonas axonopodis pv. citri str. 306
MCGIVALRSFVAEAPLQALAERALDALSRRGPDAQGLLCLEQPVPTALGHRRLAILDLSAAATQPMRCAETGNVLVFNGEIYNFLELRRELEGLGHQFRTDSDTEVILHGWRAWGEGLFPRCNGMWALVLLEQASGDLIYCRDRLGVKPLYLHHDGRQLVLASEIRAIAASLGGYPPPNPAAVFDFLVTGLSDHTSDTFYAGIRAVPPGWLYRVSPAGHSRRTPYHQWPLPGAVAPLDAQATMELLEDSTRLRLRSDAPTVSLLSGGLDSSILTTLSVQAGALPRTCFAGAFTYGYDDTEQAGFDETEAAASLMQTLGQSERHFVHRARAIPDEEELLALVAAQEEPFCTPSILASFRMYRAIRAAGYKVVLNGEGADELFGGYVRLYLALSARSALHQARLPTAIRLLSTGAVDPRLLLNRLAWDLPAGALGALLRRQRPSVACMSSALWHDQAARLQSLQVDRRVDIEARLRRDVLSTNLPMVLRMTDRNSMSAGIEVRAPFLDYRVVERALSTPALQRMGDYHGKAMLRHAFAERLPARVTTQRKSTGFGHAEQFLVDRMPLQQALATLPEGVNELLNVARLRREFASGRSHSTLWFAVSVALWYRSVYA

SEQ ID NO: 9213 - protein, 408 aa, Aquifex aeolicus VF5
MKRISFIPLLILVFFAGFILGQSSENKKEEDKYFYLKLFTEALKIVEREYVEPVPIKKLIYGAIDGMVSSLDPFSDFFTPEEYKEFLSETEGEFGGVGIEITMENGRPVVVSPIEGTPAWKAGIRPGDIIIAVDGEDTFNMSLMEVVKKIRGKPGTKVKLTILRKGEGKPIEVTLVRARIKVPSVKYTNYKGIGYIKISQFTSGTSKSLEKAILELENQNVKGFIIDLRNNPGGLLSEAVDVGDLFIPKGKLIVYTKGRKGELHRYFAEREPITQGLPVVLLVNKGSASASEIVAGALQDYHIATLVGEKTFGKASVQNLIPLSDGSAMKLTIAYYYTPKGRLIHKKGIKPDVEVKMDEETWKKLFETIRKMRFEGHMEKVILLPDIDVQLRKAIEILEKKAKLKKAA

SEQ ID NO: 9214 - protein, 145 aa, Bacillus cereus E33L
MRNLFPEITKRQNSIFDFGPSLLEGMTDAFFKPMNMDTFKVDVHEQSDKYTVKADLPGFQKENIQVEFEQDVLTIQATNHNEVEEKNENGTYIRKERSIGSVTRRFSFKQVEEENVRANYKDGVLTIELPKLKEEKNSKTTINIE

SEQ ID NO: 9215 - protein, 260 aa, Zea mays
  misc_feature (216)..(216): Xaa can be any naturally occurring amino acid
  misc_feature (247)..(247): Xaa can be any naturally occurring amino acid
FGTRPRTVPQRQPWCSRTRAPAGTAQQIISDELMLDGNPRLNLASFVTTWMEPECDKLIMDSINKNYVDMDEYPVTTELQNRCVNMIAHLFNAPIKEDETAIGVGTVGSSEAIMLAGLAFKRKWQNKRKEQGKPCDRPNIVTGANVQVCWEKFARYFEVELKEVKLSEGYYVMDPVKAVEMVDENTICVAAILGSTLTGEFEDVKQLNDLLTEKNXETGWDVPIHVDAASGGFIAPFLYPELEWDFXLPLVKSINVSGHK

SEQ ID NO: 9216 - protein, 707 aa, Burkholderia fungorum LB400
MAGKTNTQKPAAKNAQASGPQSDPKAKDLEQFRVSPEGEALRTNQGVKISDNQNTLRAGPRGPSLLEDFIMREKITHFDHERIPERIVHARGSAAHGVFQVYESMQEYTKAAFLQDPAVQTPVYVRFSTVQGPRGSADTVRDVRGFAVKFYTQEGNYDLVGNNMPVFFIQDAIKFPDFVHAVKPEAPNEMPTGGSAHDTFWDFVSLVPESAHMVLWTMSDRAIPRSLRTMEGFGIHTFRFVNAQGKGRFVKFHWRPVLGSYSLLWDEAQKLAGKDPDFHRRDLWESIERGDFPEFELGVQIIEEADEHKFDFDLLDPTKLIPEEQVPVKIIGKMTLNRNPDNFFAETEQVAFHPGHVVPGIDFSNDPLLQGRLFSYTDTQISRLGGPNFHEIPINRPVCPFNNNQRDAMHRQTINVGQASYEPNSLSGGWPKETDPAPSDGGFETYQERVEGTKIRVRSESFADHFSQAALFYNSMSPPEKDHIAAAYQFELGKVTKPEIRARVVNEILANFDAGLAAQVAEGLGLPAPKKGTAKLTGPKESPALSLLNRVKPGIKTRKIALLAAPGSDGAAIKKLQQALQGEGATPMLIAPTLAAIDGMAPDATIAGLPSIMFDAVIVVGGDQGAKALAQSGDARHFVLEAFKHLKAIAAIGAGRDVLAAAHLPHNADGVATGDDKQAAEVLKAFIEAAGQHRVWSRAQQAETVPA

SEQ ID NO: 9217 - protein, 232 aa, Oryza sativa
MTWSSDSDRDDEPATAAAASADDASLATSFFLQQPGTPPAAAPAPARRRRHKNRRPRAHRRAAAKNEEEEEVAGTEDVWRGAQWEAAWPRRAAARPVVVADDAAGAAAAREDAPGVGGEGGGLGVGRARSLTDDDLEELKGCVDLGFGFSYDEIPELCGTLPALELCYSMSQRFLDEHHHSPEAEPAPVAPSSPAQPIANWKISSPGDSPDEVKARLKYWAQAVACTVRLCS

SEQ ID NO: 9218 - protein, 548 aa, Spirodela punctata
MGVCFSKASKPSGNGYQPPPPQPYKPPPPPAARPAQPSVQIPQTHHTQQRQQSDHQSASQAAPSPAKQHLPSPRNSPAAAVSAATPATVLGKPFEDVKAKYTIGKVLGRGQFGVTYLCTCNSTGAKYACKSISKRKLVNRNDREDVKREIQIMQHLSGQENIVEFKGAYEDRHSVHVVMELCAGGELFDRIIAKGHYSERAAAAMCRSIVNVVNICHFMGVMHRDLKPENFLLSTKDPGAALKATDFGLSVFIEEGKVYRSIVGSAYYVAPEVLMRSYGKEIDVWSAGIIVYILLSGVPPFWGETEKKIFDSIMKDDIDFQSDPWPSISASAKDLVSKMLTRDPKKRITAAQVLDHPWIRVDGEASDKPIDSAVLSRMKQFRAMNKLKKMALKVIAESLSEEEIKGLRQMFQNMDTDQSGTITYEELKTGLARLGSRLSEAEVKQLMDAADVDGNGSIDYIEFITATMHRHKLEREEHLYSAFSYFDKDNSGYITRDELKQALEEHGMGDADSIREIISEVDTDNDGRINYDEFCAMMRSGTHPPGRP

SEQ ID NO: 9219 - protein, 619 aa, Candida tropicalis
MSEQNQGQPDQQHSGDHQHHHHHHHHHHHSQQPAQPIPIDPNVNPANRIGRYQIIKTLGEGSFGKVKLAQHVGTGQKVALKIINRKTLAKSDMQGRVEREISYLRLLRHPHIIKLYDVIKSKDEIIMVIEFAGKELFDYIVQRGKMPEDEARRFFQQIIAAVEYCHRHKIVHRDLKPENLLLDDQLNVKIADFGLSNIMTDGNFLKTSCGSPNYAAPEVISGKLYAGPEVDVWSSGVILYVMLCGRLPFDDEFIPALFKKISNGVYTLPNYLSPGAKHLLTRMLVVNPLNRITIHEIMEDEWFKQDMPDYLLPPDLSKIKTSKIDIDEDVISALSVTMGYDRDEIISVIEKANREAAAGGATPTNQSKSTNEVLDAYLLMKENHTLVKDLKKSKSENIESFLSLSPPPSSSFPNPGSTSSAPGVQQSLTYQTLATVPDLSTLPNSTIAILPTSLPSIHRAYMMETKVNDPQQQIPAPQPTKKLKTRWHFGIRSRSYPLDVMGEIYRALKNLGAEWAKPTEEELWTIRVRWKYDSTPQLRVWQRTNLMKMQIQLFQLEPNNYLVDFKFDGWEQTSDESKNDASLDYKQQDLDEVGSFSAYPFLHLATRLIMELAVNSQSG

SEQ ID NO: 9220 - protein, 741 aa, Pseudomonas syringae pv. tomato str. DC3000
MNAPDKTGTDRRAVPAAVDLDALIRAEHRDPFSILGPHDDGKGGQYVRAYLPAALSVRLLARDDGRELAELHMSDVPGFFVGHLEQPQPYLLKINWAGGEQITEDPYSYGPLLGEMDLYLFAEGNHRDLSSCLGAQVTSVDGVEGVRFAVWAPNARRVSVVGSFNGWDGRRHPMRLRHPTGVWEIFVPRLQPGEVYKYEILGAHGILPLKSDPMALATTLPPDTASKISAPLKFEWHDQDWLQSRAGRHDVAAPLSIYELHAGSWQMEQNDEGQWRQYNWRELADRLIPYVKELGFTHIELMPIMEHPFGGSWGYQLLAQFAPTARYGSPEDFAAFVDACHQAEIGVILDWVPAHFPTDTHGLAQFDGTALYEYADPKEGFHQDWDTLIYNLGRTEVHGFMLASALHWLKHYHIDGLRVDAVASMLYRDYSRKAGEWVPNRFGGRENLEAIDFLRHLNDVVALEAPGTMVIAEESTAWPGVSESTQKGGLGFNYKWNMGWMHDSLQYMEEDPINREHHHGKLSFSLVYAWSERFVLPISHDEVVHGKHSLIDKMPGDRWQKFANLRAYLAFMWTHPGKKLLFMGCEFGQWREWNHDEQLDWYLMQYAEHVGVKKLVGDLNRIYREEKALHQRDADPTGFQWLIGDDKSNSVFAYLRWSNDGEPLLVVANMTPVPREGYRVGVPLQGAWTELLNSDAETYAGSNIGNGGEVISEDEPVHGMSASLTLNLPPLAVLIFKPKKG

SEQ ID NO: 9221 - protein, 425 aa, Xylella fastidiosa Ann-1
MMSNSPQTPLVTRQRLSEVRYEIRGELARRARELEAEGRKLIKLNIGNPGAFGFRAPEHLQRAIADDMGRTDPYTHQQGLPIAREAIAAAYARRHYPDADADRVFVGNGVSELIDLSLRALLNPGDEVLVPSPDYPLWSAATILNDGRPVYYRCAPENGFQPDAVEIETLVSSRTRAIVLINPNNPSGANYSQELLERIAAIAVKHHLLLLVDEIYDQILYDGAVFVPVAPLAGTHPCITFSGLSKVHRACGWRVGWALLSGSSIQVDNLRNAMDLLGALRLCANVPGQYAIDAAVNGPDTITPLCSPGGPLYETRRAVIDACAASEHLSLVVPAGALYAFPSVVGPAARHFDDYAFALELMNEEGVLVVPGSSFNVPYRDHFRVTLLPDAGLIREVFSRIDRALSRRAEVAEKVVPLKLRSAAA

SEQ ID NO: 9222 - protein, 479 aa, Lactobacillus sakei subsp. sakei 23K
MTNQLTTNEGQPWADNQHSQTAGQRGPVLIQDYQLLEKLAHFNRERIPERVVHAKGAGAKGYFKVTKDMSAYTKAAVFSGVGKKTPLITRFSQVAGEAGYPDTYRDVRGFAVKFYTEEGNYDIVGNNTPVFFVNDPLKFPDFIHSQKRDPRTHARSQDMQWDFWSLSPESVHQVTILMSDRGIPASYRMMHGFGSHTFKWVNAQGEQFWVKYHFKTNQGVHNLSNELADELAGKDTDYLQNDLFDAIETGDYPSWTVAVQLVPYEDGLNYPQDIFDVTKVISQKDYPLIEIGQMVLDENPTNNFEDIEELAFSPANLVPGIEASPDKLLQGRLFGYKDAERYRLGANYEQLPINRPKVPVHNYERDGVMAQKQETGVNYEPNSQDGPTEVPAAKIHSDQLSGTTGNFSTDPDYYSAAGKLYRLLSADEQTRLIENIRMNLGQVTKPEIQIREVKQFYQADPEYGRRAATALNLDLAQFE

SEQ ID NO: 9223 - protein, 151 aa, Hordeum vulgare subsp. vulgare
MSIVRRSNVLDPFADLWADPLDTFRSIFPAISGGNSETAVRERRMDWKGRRLEAHVFKADLPGVKKEEVKVEVEDGNVLIVSGERTKEKEDKNDKWHRVERRSGKFVRPFRLPEDGKVDEVKAGLENGVLTVTVPKAEVKKPEVKAIEISG

SEQ ID NO: 9224 - protein, 485 aa, Arabidopsis thaliana
  misc_feature (53)..(53): Xaa can be any naturally occurring amino acid
  misc_feature (215)..(215): Xaa can be any naturally occurring amino acid
  misc_feature (226)..(226): Xaa can be any naturally occurring amino acid
  misc_feature (234)..(234): Xaa can be any naturally occurring amino acid
  misc_feature (358)..(358): Xaa can be any naturally occurring amino acid
MAEKITRETSLPKERSSPQALILGRYEMGKLLGHGTFAKVYLARNVKTNESVXIKVIDKEKVLKGGLIAHIKRGGAVLRRVRHPNIVQLFEVMATKAKIYFVMEYVRGGELFNKVAKGRLKEEVARKYFQQLISAVTFCHARGVYHRDLRPENLLLDENGNLKVSDFGISAVSDKIRQDGLFHTFCGTTAYVALEVLDREGYDDAKVDIWSCGVXILFVLMIGYLXVNDRGVLXLYRGLQGELGRRGENEATSFFELWRRIRETFTSPKLCRILVKKGLKHIKSNVEDDKLCNVVDDDELESDSVESDRDSAASESEIEYLEPRRRVGGLPRPASLNAFDIISFSQGFDLSGLFDDDXGEGSRSAPRAPVPKIISKLEEIAKVVSFTVRKKDCRVSLEGSRQGVKGPLTIAAEIFELTPSLVVVEVKKKGGDKTEYEDFCNNELKPKLQNLTADDVVAEPVAVSAVDETAIPNSPTISFLPSDTE

SEQ ID NO: 9225 - protein, 392 aa, Saruma henryi
PYEVPMTAAGALQSYKLAAKAISRLQSVPSGCLDRLIDTVVQEVYELTGYDRVMAYKFHEDDHGEVISEVTKPDLEPYLGLHYPATDIPQAARFLFMKNKVRMICDCRAKSVKVYQDEHLSFDLTLCGSTLRAPHSCHLQYMGNMSSIASLVMAVVINEGEEDDDGPDSTQQQAQPKRKRLWGLVVCHNTTPRFVPFPLRYACEFLMQVFAIHVNKELELENQIREKNILRTQTLLCDMLLRDAPLGIVTQSPNIMDLIKCDGAALLYENKVYRLGVTPTESQLHEIVQWLSEHHMDSTGLSTDSLHEAGYPKALSLGDIVCGMAAVRITTHDMLFWFRSHTAAEVKWGGAKHDPSDKDDGRRMHPRSSFKAFLEVVKTRSLPWKDYEMDAI

SEQ ID NO: 9226 - protein, 385 aa, Colwellia psychrerythraea 34H
MKNSILFNAKKLGTFEASNRVVLAPMTRSRTAQPDDVPTDLMAEYYAQRASAGFIITEATQISSQGKGYSFTPGMFTPEQVTGWKKVTQAVHQADGHIVSQLWHVGRMSHASFHVDGLPVAPSAIAPDAQVWVVGEDGIGRMVDCPVPRELSKQDIKDIVLDYRLAASNAIEAGFDGIEIHGGNGYLIDQFLRRSSNKRNDEYGGSITNRLRFVMEVVEAVSDEIGANKVGIRLAPFITQRGMHDIEAIDAILLASKKFNDLGLAYIHLSEADWDDAPLVSDQFRQALRLNFNGSIVVAGNYTAKTGADLIDSGLVDFIAYGRKFLANPDLPYRFKHDLPLNDITDPSTLFGGDARGYTDYPRYSDQASVAQSNDSTKPTAEILP

SEQ ID NO: 9227 - protein, 391 aa, Saruma henryi
DLEPVNPDDVPVTAAGALKSYKLAAKAISRLQSLPSGNISLLCDVVVREVSDLTGYDRVMAYKFHEDEHGEVIAECKRSDLEPYHGLHFPASDIPQASRFLFMKNKVRMICDCSAPPVKVIQDKRLAQPISLGGSTLRAPHGCHAQYMANMGSIASLVLSVTISEDDDETCSKQKGRKLWGLVVCHHTSPRFIPFPLRYACEFLIQVFGIQLNKEVELAAQMRETHILRTQTMLCDMLLRDAPMTIVTQSPNVMDLVKCDGAALYYRKESWLLGVTPTKAQIQDLAEWLLKDHNGTTGLSTDSLVEAGYPRAHNLGDMVCGMAAVRITNQDFLFWFRSHTAKEVKWGGAKHDPADKDDDRGKMHPRSSFKAFLEVVKRRSLPWEDVEMDAI

SEQ ID NO: 9228 - protein, 374 aa, Streptomyces coelicolor A3(2)
MFASVLVAGAASGSLPGTDRKSEPGTARSAAPAGQQARHDDVARAAAEAMADGKSPVEAAERAVSRSGDRWGAVYSEGEYEELEDALDGRYTGVGLSARRERDGRIEVTRVRSGSPAAGAGIREGDRLRSVDGERVDGRPVTEVVSILRGDGEREPAGTAVRLGLERGTRAWTETVRRARLSTDPVTVRTLADGLTVVKVTSFTKGVGEQVREAVARVPSGAGVVLDLRGNSGGLVTEAVTAASAFLDGGLVATYDVDGDQRALHAEAGGDTTRPLVALVDGGTMSAAELLTGALQDRGRAVVLGSRTFGKGSVQMPSRLPGGSVAELTVGHYRTPSGRGVDGTGITPDLEVDPADPGALARARTVLSGLGPTA

SEQ ID NO: 9229 - protein, 414 aa, Saururus cernuus
SGKPFYAIVHRVTGSLIIDFEPVKPFEVPMTAAGALQSYKLAAKAISRLQSLPSGSMERLVDTVVQEVFELTGYDRVMAYKFHEDDHGEVISEVTIPHLEPYIGLHYSATDIPQAARFLFMKNKVRMICDCHAKPVKVYQDDKLSFDLTLCGSTLRAPHSCHLQYMENMGSIASLVMAVVVNEGGDEDKGPDSSQQLGDNRRKRLWGLVVCHNTRPRFVPFPLRYACEFLTQVFAIHVSKELELERQIREKNILRTQTLLCDMLLRDAPMGIVNQSPNIMDLIKCDGAALFYKDKVFRLGNAPSETDIRDIAQWLFAHHMDSTGLSTDSLHDAGYPKAAFLGNLVCGMAAVKITCSDMLFWFRTHTAAEIRWGGAKHDHSERDDGKRMHPRSSFKAFLEVVKTRSLPWKDYEMD

SEQ ID NO: 9230 - protein, 391 aa, Saururus cernuus
DLEPVNPSDVPVTAAGALKSYKLAAKAISRLQSLPSGNISLLCDVLVREVSDLTGYDRVMAYKFHEDEHGEVVSECKRADLEPYLGLHYPATDIPQASRFLFMKNKVRMICDCLAQPVKVIQDKRLAQPLSLAGSTLRAPHGCHAQYMANMGSIASLVMSVMVSEGDDDSNEEKTGRKLWGLVVCHHTSPRFIPFPLRYACEFLIQVFAIQLSKEVELAAQMREKHILRMQTVLCDMLLRDAPMGIMTQSPNVMDLVKCDGAALYYRYQCCLLGTTPTENQIRDITEWLLQYHNSSTGLSTDSLVEAGYPGAHELSDAVCGMAAIRITSKDFLFWFRSHTAKEIKWGGEKHDPLDKDAFESKMNPRTSFKTFLEVVKRRSLPWEDVEMDAI

SEQ ID NO: 9231 - protein, 279 aa, Bacillus anthracis str. A2012
MKNLQSTTKLHNGVEMPWFGLGVFKVEEGPELVEAIKSAIKTGYRSIDTAAIYGNEAAVGEGIRAGIEATGISREELFITSKVWNADQGYKETIAAYEESLKKLQLDYLDLYLVHWPVEGKYKDTWRALETLYKEKRVRAIGVSNFQIHHLQDVIQDAEIKPMINQVEYHPRLTQKELQAFCKEQGIQMEAWSPLMQGQLLDNETLQAIAEKHGKTTAQVILRWDLQNGVITIPKSTKEHRIIANADVFNFELTKEDMEKIDALNENHRVGPDPDNFDF

SEQ ID NO: 9232 - protein, 401 aa, Trochodendron aralioides
GKPFYAIVHRVTGSLIIDFEPVKPYEVPMTAAGALQSYKLAAKAIARLQSLPSGSIERLCDTLVQELFELTGYDRAMVYKFHEDDHGEVVSEITKPGLEPYLGLHYPATDIPQAARFLFMKNKVRMICDCRAKNVKVLQDEKLPFDLTLCGSTLRAPHSCHLQYMENMNSIASLVMAVVVQEGDEQARALVPHSLRRRKRLWGLLVCHHSTPRFVPFPLRYACEFLAQVFAIHVNKELELENQILEKNILRTQTLLCDMLMRDAPLGIVSQSPNIMDLVKCDGAVLLYKNRTWRFGSTPSELQIHDIALWLSEYHMDSTGLSTDSLYDAGFPGALTLGDGVCGMAAVRITSKDMLFWFRSHTAAEVRWGGAKHEPGEKDDGRRMHPRSSFKAFLEVVKSRS

SEQ ID NO: 9233 - protein, 390 aa, Trochodendron aralioides
DLEPVNPADVPVTAAGALKSYTLAAKAISRLQSLPSGNLSLLCDVLVREVSELTGYDRVMVYKFHEHKHGEVVAECRISDLEPYLGLHYPATDIPQASRFLFMKNKIRTICDCLAPPVKVIQDKRLVQPLSLCGSTLRAPHGCHAQYMENMGSIASLVMSVMNHEDEDEIESDRKGRKLWGLVVCHHTSPRFVPFLLRYACEFLIQVFGIQLNKEVELAAQLREKHILRTQTVLCDMLLRDAPVGIVTQSPNVMDLVKCDGAALYYRNTIWLLGVTPTEAQIRDIAGWLLEYHNGSTGLSTDSLMEAGYSDALLLGDAVCGMAAVKITSKDFLFWFRSHTAKEIKWGGVKHDPVDKDDGRKMHPRSSFKAFLEVVKRRSLPWEDVEMDAI

SEQ ID NO: 9234 - protein, 225 aa, Bacillus subtilis subsp. subtilis str. 168
MNLTYKVHPIKTRYQGWTNYCYIIEDIVSRSAIVVDPSWELSKITTTLSELEAELKAVALTHSHYDHVNLVDPLTKMFNAQVYMSKKEIDYYQFRCRNLISLDDHQTISIGNTRAQCLLTPGHTAGGMCYLFSESIFTGDTVFTEGCGICEDDGSSAEEMFDSIQRIKSEVSPHVRVYPGHSFGKSPGHSIKDLYQHNIYFQIDKKEYFVKFRTRKNQKGIFDFK

SEQ ID NO: 9235 - protein, 740 aa, Methylococcus capsulatus str. Bath
MTDSSTLAELSPDFQRIVEARHHDPFAVLGRHRRDNRDLIRAFLPQAEEVRVGSAGRVMERIAGTAIFECEVEAETTDLHYRLYWTDQTGQTHSFIDPYTFPPRLSDFDLYLFGEGRHWNIYRVLGAHPHSVDGIDGILFATWAPNAERISVVGEFNGWDGRRHPMRVRGASGVWELFIPELQPGLLYKFEIRNRAHGTIHLKSDPYGRQFELRPNTASIITRESGYAWNDADWLAQRKDWPWLHRPLSVYEMHAGSWKRDLEGGYLNYRDLAHELVDYVKSAGFSHIELMPVTEHPLDASWGYQTTGYFAPTSRFGTPDDFRYFVDHCHRNGIGVILDWVPAHFPKDAHGLARFDGTALYEHEDPRLGEHRDWGTLIYNYGRNEVKNFLLGSALFWLEEFHLDGLRVDAVASMLYLDYSRQPGDWIPNKYGGNENLEAIAFLRDLNTVVHQQFPGVLVIAEESTAWPQVTRPTWTGGLGFSMKWNMGWMHDILVYMGKDPVHRHYHHDQLTFGLLYAFTENFVLPFSHDEVVHGKGSMLAKMPGDEWRRFANLRVLYTMMFTYPGKKLLFMGCEFAQTGEWNHTTALDWPLLESNLHKGVLHLVSDLNRLYQSTSALYAYDFESQGFEWIDSHDAAQSVISYVRRDDDSHVVVVLNFTPVPRHNYRIGVPEPVGYREVFNSDAECYGGANLGNWEIKTESVEWMGRAQSVVLTLPPLAGIVLAPVAPSATPDCGTPGDE

SEQ ID NO: 9236 - protein, 245 aa, Phalaenopsis amabilis
MGRGRVQLKRIENKINQQVTFSKRRSGLLKKAHEISVLCDADVALIIFSNKGKLCEYSTDSSMEKILERYEHYSYTERALYSNEDNPQADWRLEYNKMKAKVESLQKSQRHLMGEQLDYLSIKELQHLEQQLESSLKHIRSRKTQLMVDSISELQKKEKLLLEQNKTLQDMAKAKAKALVQNAAWEQQNKSQYSSEPPHAVISDSVPTPTSRTFQTRANGEESPQPQLRLGNSLLPPWMLSHVNG

SEQ ID NO: 9237 - protein, 250 aa, Phalaenopsis amabilis
MGRGKVQLKRIENKINRQVTFSKRRSGLLKKAHEISVPCDAEVALVIFSAKGKLYGYSTDSCMDRILDRYERYCYAEKALQITEPESQGDICNEYGKLKNKIEALQKSRSHLMGEQLDSLSIKELQHLEQQLETALNHIRTQRIQLLLNCITEFQRKEKSLLEHNSLLEAKLCSFQLDPQITETATQNPNRKQQKQDQVNSSPSPFLPPNHLPTLNLGTYPASDGEEAEDPTLLQMNSISLPPWMLRSST

SEQ ID NO: 9238 - protein, 460 aa, Zea mays
  misc_feature (307)..(307): Xaa can be any naturally occurring amino acid
MVNGERRADAECTRASLLGRYEIGRTLGEGNFGKVKYARHIASGGHFAIKILDRSKILSLRIDDQIRREIGTLKLLKHPNVVRLHEVAASKTKIYMVLEFVNGGELFDKIAIKGKLSEHEGRRLFQQLIDGVSYCHDRGVYHRDLKPENVLVDRKGTIKISDFGLSALPQHLGSDGLLHTTCGSPNYIAPEVLQNRGYDGSLSDLWSCGVILYVMLVGCLPFDDRNLVVLYQKIFKGDCQIPKWLSPAAQDLLKRILQPNPMKRINVAGIREHEWFKKDYVPAVPHDDDEDVLPSPAPSIKPIDEPXQEKCSPINAFQLIGMASSLDLSGFFEEEDAAQRKIRFTSTHPPKDLFDKIESVVMEMGFKVHRGAGKLKVLRNSKCSRNPSSLLVCTEVFELGPSLYVVELRKSHGDSTLYRQLCERLSDELGACKTDQIARTESSSDDLSSVDGEAFPLSGF

SEQ ID NO: 9239 - protein, 770 aa, Magnaporthe grisea 70-15
MAPRNVLIYLFRKDLRVSDNPILHGLATQKDHGFTHLLPVYIFPANHIEISGFISDQSEKSPYPEARSKVAGYWRCGPYRAKFISQAVWDVKNSLESINSGLLLRLGSFQDVLEGLLDGLKARGDTCSVWMVGEEGLEEIQDEISISNVCRTRGYDFEKLVDEKYFIDDRDLNFAEPQELPGIFTDYRKSVEPLRERPRKSLPTPEKDSLPPFPEPDTIAEQSRPFSIPDTYEGFETALLKPVKDFSGAPFPEHAENATTAHPFKGGETAGQERLQYVMSSGIIKDYKTSRNGLIGPDFSTKLSAYLAQGCITARQIHESLLAYEDGSAAELEEIEGYGQGENINTKSVREELMWRDYMRLYARKIKEKLYSVEGPRGGRNYDSSNSGEVVDSGSPPIAKKVIWKTPDPATADPRQIPEPEKIKVCLDRFLAGTTGLGLIDASMRELMHTGYTSNRARQNAANFLAKHLGIDWRWGAEWYEMLLVDYDVCSNWANWQYVAGVGNDPRGEARIFNPVKQAFDYDKEGAYVKMWVPELAPFGNKLELVFQACKATPQERDEAGLSDNIMVTDPVKRISFNPNGKPPSKRPWKKKDSGSGNTAGGGGGSPKEGSPRTETHSGGQGKGDGGSHQSRGGRPQWRGAQGYSPQMGRAPPGNGPGYRSYHHGAYGGPGPQGGRGGWQRRAGGPVRGGGLQSFGYRNPYYAGRGGYPQQPYEGGPPNYVPVQGGGQHGPMSHYGPGGGGSTQSQQAWTPPNQRQQPQQQQQQQQQSNA

SEQ ID NO: 9240 - protein, 1142 aa, Bacillus sp. KSM-1876
MKGKLKKFLVLSMVFILTFSSFGMMGTTQLVEAETKSSIEESEIPENTLRIHYQNSSGDYSNLGVWTWDDVESPTDNWPSGGIPFTEEQVTDYGAYVDVPLESGARNVGFLILDIVTGGKDDAGHNGGDKRLELFSPNINEVWISEGSDEISFIEPVDLPEDTVRVHYKKADGNYENWSLWFWGDVQSPSETQGDFPSGATGFSEEQIGKYGAYIDIPLNEGAEEIGLVVVNKETNEQEADRSFTQLNQFNQIFIVEGDGAVYSNPYGAIATELLSAEQLSDEKIVLYFSRTDELTEEALLEQVGIRDIEEHTVDVNEVEIKTDNRTVEVKGDFNLDQSPYTVSLGEVSVPAKIGWRLIDEMYAYDGELGAQLHQDGTATIKLWSPKAEHVQVILYDKDNPDDIVTEVEMKLGDRGVWEVQLTKENTGLDSLRGYYYHYEIDHDGDKKIALDPYAKSLSAWNSDEQGPYAKAAIVDPSSIGPELEFAHIEGFEKKEDTIIYEVHVRDFTSDPHIADELTAQFGTFASFVDKLDYIEDLGVTHIQLLPVMSYFFANEFKNDERMLDFSSTNTNYNWGYDPQSYFALTGMYSEDPTDPELRIKEFKKLIDEIHSRGMGVVLDVVYNHTARVGIFEDLVPNYYHFMDADGTPRTSFGGGRLGTTHEMSRRILVDSITYWVEEFKIDGFRFDMMGDHDAESIQIAYDKAKEINPNIVMIGEGWITYAGDEDDPNVQAADQHWMQYTESVGVFSDEFRNELKSGFGHEGEPRFLTGGARNIDLIFDNIKAQPHNFIADDPGDVVPYIEAHDNLTLHDVIAMAIQKDPDDHQEEIHQRIRLGNLMTLTSQGIAFLHAGQEYGRTKQFRAETSEPPYKSTYMTDENGEPFRYPYFIHDSYDSTDIINRFDWERATNADAYPIQNLTREYTTGLIELRRSSDAFRLGTKDLVDEKVTQLNIPEIEETDLVVAYRIEATTGEAFYVFVNADDEERTLTLEEDLTVGEFVVDGKTAGVTAIAEPQGVELSAEQIKLDPLTAAIVQVGGIEAPEKPTPPKEEPKEPKEPKEPKEPKEPKDPKDPKDPKDPLDPPGTDDQNGETPKGNEEKKEEQKGDNLPNTATSNYQFIALGIALVLMATAIYWWKRKRQVA

SEQ ID NO: 9241 - protein, 105 aa, Glycine max
FAIERQAVNEATFRCPDEMGWKPQTTLLPVEEITKALANKGYDVMTSDDAGRFVCNYVYYHSLRFAEQNGTKSLFVHVPLFSTINEETQMQFAASLLEVLASTCQ

SEQ ID NO: 9242 - protein, 258 aa, Thermobifida fusca YX
MAVPTVTLNNGVTMPQLGFGTWQVGYDAVAAALAAGYRCFDTAEMYRNETAVAAALADSGLDRSDVFITTKLWNNHHGFQPALDAFHASRRRLGLDVIDLYLIHWPNASDAVNVETWRALEQLYAEGVVRAIGVSNFSPAQLAVLLEACDVVPAVNQIELNPSRPRLEERVYHARHGIATQAWAPLAKGGALLTHPVITEIAEAHQKTPAQVVLRWHLQHGILVIPRSATPERIRSNFAVTDFSLAPQEMAAVDALGA

SEQ ID NO: 9243 - protein, 440 aa, Methanococcus voltae
MRNNIVNKGTEELSYEIRGIVAVAERAQKLGKKIIWENIGDPIAKGEQMPEWIKEIVSESTLENKTYGYCPTQGLLETREFLADLNNSKNGAQITSDDMIFFNGLGDAITNIYGLMRKECRVIGPTPAYSTHSSAEGLYSNSSPVMYSLDKDNLWYPDLDDLENKVKYNPSVSGILLINPGNPTGAVYSKKVLSDIVDIANEYDVFILCDEIYQNLVYNGKKHVSLSEVIDDVCGISMKGISKDLPWPGSRCGWTEFYNKDKDPVFKKYVENIGKFKMIEVCSTTLPQTIIPKVMGDKRFEKSLGERKKYYEKASNYAYKTINKVEGVSVNLTNGAFYGALTFDDGVLNDKQHLKMDNELDTYINGVLDQCGQHSLVEKDKRFVYQLLGASGICMVPLTSFCSKHEGLRFTLLEKDENLMKWTFKTLSEKIDEYLNSSAN

SEQ ID NO: 9244 - protein, 463 aa, Listeria monocytogenes str. 4b F2365
MNNNFLWGGATASYQCEGAWDVDGKAESMWDYYLHEAGLENGDVASDHYHRYEEDIRMMKEGGQNSYRFSLSWPRIIKNRQGDINLKGIEFYQNLLDTCKKYDIEPFVTLYHWDLPQYWEETGGWLDHDVCAAFEHYAKVCYDHFGDKITNWTTFNEPKWFVANGYKIGNYPPGYQDTHKTMIAAYNVMYASALGVKAFKEGGYPGQIGIVHSYTPVNGVDESIETKIAMRYADNYCNNWILDTAALGEFPVDLIAELAKSHDISFMKTDELQTIKQNTVDFIGLNYYSRTLVKPYTGGETQLQFNHSGKKGESKVLIKNWFEQVKDPANETTEWDTEIYPKGLQDGLIEAYERYQLPLYVTENGIGVREDVSVPQVDDAYRIAFMNDHINAIFNAIDAGCDVRGYYAWSPFDLYSWKNGVEKRYGLVAVDFENNQIRKPKASYYWFKEMIKSQGKLIKRREF

SEQ ID NO: 9245 - protein, 310 aa, Neurospora crassa
MADHTEVDLDSIIDRLLEVRGSRPGKQVQLLEAEIRYLCTKAREIFISQPILLELEAPIKICGDIHGQYYDLLRLFEYGGFPPEANYLFLGDYVDRGKQSLETICLLLAYKIKYPENFFILRGNHECASINRIYGFYDECKRRYNIKLWKTFTDCFNCLPIAAIIDEKIFTMHGGLSPDLNSMEQIRRVMRPTDIPDCGLLCDLLWSDPDKDITGWSENDRGVSFTFGPDVVSRFLQKHDMDLICRAHQVVEDGYEFFSKRQLVTLFSAPNYCGEFDNAGAMMSVDESLLCSFQILKPAEKKQKYVPSLR

SEQ ID NO: 9246 - protein, 471 aa, Vibrio vulnificus YJ016
MAMKLVWLRRDLRCVDNTALNHAIATSQEVVACFVATPLQWRDHHMAPMQADLIARRLAVLAEELNALNIPLLYDEVDDYAQSATRVANWAEQLAVSEVVLNREYEVNERVRDEQLVNRLASSEMGVLDVEDKCVQAPGCVLNKQGDYFKVFTPFKKAWLKSFIPPQIIKTSAAQPVVLPEALQSSLWHEQAPFSYPRQSSEAWSVDSQQIRETLRRFCHEEVDRYHEQRDFPATAGTSVLSPYLAIGAISVRQCIARLYWQQSYLSNGREVWLSELIWREFYHHLIHFEPKLVKGQGFVEWEKHLLWPAKPDWFERWCRGETGYPIVDAAMRQLNQTGWMHNRLRMIVASFLTKDLHVNWRLGEQYFMQKLVDGDFAANNGGWQWCASTGCDGQPYFRIFNPITQGEKFDPNGEFVKHWLPELAEVPSKFVHQPWKWLGHMRLDYPAPMVDHKQEREITLSLYTQAKDCL

SEQ ID NO: 9247 - protein, 384 aa, Oryza sativa (japonica cultivar-group)
MAFDAFTDKNAVFRRLKAKPENKMCFDCSAKNPTWASVTYGIFLCLDCSAVHRSLGVHITFVRSTNLDSWTPDQLKMMAFGGNNRAHAFFKQHGWTDGGKVDAKYTSRAAELYRQILQKEVAKSSADNVLPSSPVAASQPQNPSDDFPEFKLPEAPAENTNGKQEPDVTNSQKAPTQTPKAPTHPTFATSVKKSIGAKKIGGKTGGLGVKKLTTKPSESLYDQKPEEPKPAAPVMTTSTTKSGPSLHSRFEYVENEPAVDSRNGGTQMTGHVAPPKSSNFFQEYGMDNGFQKKTSTAATKTQIQETDEARKKFSNAKAISSSQFFGNQSREEKDAQMSLQKFAVRISLASLCPRTITLHLLRTCRSILNFIPDLKFLVYCLCLC

SEQ ID NO: 9248 - protein, 178 aa, Glycine max
IRLEGGYMEVTGFSAEVREQIYKVASVNLCSNISGQILASLVMSPPKVGDESYDSFMAEKENILASLARRAKTLEDAFNKLEGVTCNKAEGAMYLFPQIRLSEKAIKAAEAANATPDNFYCKRLLNATGVVVVPGSGFGQVPGTWHFRCTILPPEEKIPAIVTRLTEFHEKFMDEFRD

SEQ ID NO: 9249 - protein, 605 aa, Methylococcus capsulatus str. Bath
MCGIAGLVLKGRNVQADRLHPMIERLAHRGPDGQGVFTEGGFGLAHTRLSIIDLSGGRQPILADDGRLAVVANGEIYNHVELREALEREGRRFATHSDSETILHAYALDPEGFAGRLHGMFAFALYDGVRRRLVLGRDRLGIKPLFYAALPDRLVFASEMKAILPLLPNAPTIDAGAFSQFLHTHCSTGEETLFSGIRRLGPGEILEADAELNLRKRRYWTPLGVRSRALDFAEAEAEFEGMFEQVMKEHVRSDVPYGLFLSGGNDSAILLAMLSRLQAQPVRTFSIGYVDAAMKDELGDAERIAQVFGSRHTSIRLRREDLFRRIPHTVWAADDLMRDYASFPTSALSEAAAKELKVVFTGEGGDEVFGGYRRYRQPRLAWLARNLLAPGTGGFRTRSEWWRKRSQRLFGPALAAERKHFRAPYLKAWSEAPAVWSHLQHCQYTDLVTDLPDSLLVKVDRMMMGFGLEGRVPFLDHRVVEFGLGLPDALKTDGKRPKVFLRRWAERHVPKEHLYTKKRGFTVPVREWLGGELLDRLEGKLSGNAAVREWFDTRHFPALFQAQRKKGNASREIFCLMQFAIWHRLFIDQPGLKPSPDEDPLDWIS

SEQ ID NO: 9250 - protein, 548 aa, Colwellia psychrerythraea 34H
MAAKDVLFGNDARTKMLRGVNVLADAVKVTLGPKGRNVVIDKSFGGPTITKDGVTVAKEIELDDKFENMGAQMVKEVASKANDEAGDGTTTATVLAQAIVNEGLKSIAAGMNPMDLKRGIDKAVIAAVAALKDASTPVTDNKAIEQVGTISANSDETVGQIIATAMDKVGAEGVITVEEGQALTDELDVVEGMQFDRGYLSPYFINKQENGTVELENPFILLVDKKVSNIRELLTTLEAVAKSGKPLLIIAEDVEGEALATLVVNNMRGIVKVAAVKAPGFGDRRKAMLQDVATLTAGTVISEEIGMELEKATLEDLGQAKRVVISKDTTIIIDGIGEEADIKARVSQIRGQIEDSSSDYDKEKLQERLAKLAGGVAVIKIGAATEIEMKEKKARVEDALHATRAAVEEGVVAGGGVALVRAAEAIKDLEGINEDQTHGINVAIRAMEAPLRQIVANCGDEASVVLNEVRNGEGNYGYNAGNSTYGDMIAMGILDPTKVTRSALQFAASVAGLMLTTEAMITDAPQDSAPAMPDMGGMGGMGGMGGMM

SEQ ID NO: 9251 - protein, 445 aa, Arabidopsis thaliana
MASNGVTNCNANANVWRFKGNGATSDAAAVTLRKLAFGMFKNCTMNSGKTILFPTPGEPSAHSNFRTCPEAEEAVADAARSGMANSYAPSPGVFKARRAVAEYLNGELPTKLKAEDVYITGGCNQAIEIVIDSLAGNPSANILLPRPGYPHYDARAVYSGLEIRKYDLLPESDWEINLDGLEAAADENTVAMVIINPNNPCGNVYTYDHLNKVAEMARKLGIMIISDEVYDHVVYGDKPFIPMGKFASIAPVITLGSISKGWVNPGWRVGWIAMNDPNGIFVSTGVVQAIEDFLDLTPQPSFILQEALPDILEKTPKEFFEKKIKAMRRNVELSCERLKDIPCLFCPKKPESCSYLWLKLDTSMLNNIKNDFDFCTKLVSEESLILIPGVALGAENWVRISIGTDESVVQEIFDRLKGFYDRHAISKEAIKLSGHAINQIVVSVN

SEQ ID NO: 9252 - protein, 661 aa, Geobacter metallireducens GS-15
MNLETWRIRNWRLFTKIFLMSTVAVFVIIAGLLGFFLPLLESKLIHERTDNASHIVDAARSIAAHYHSLQLRGELSEPEARRLAVNTLRALRYNVNGYVWVHDLENRMVMHPLQPELEGHYLTRLADARGKPLFLTMNNLVRREGKGEVDYLWPRPGEQEPSRKVSYVSLFEPWQWVLGSGVYLDDVQDEISMLEARVITGALVTLLLSVVFSAYAAYRINRPLRQALFCAAAAMGHDTSVVEDKSHDETHQVLHTIERMVNDLKRSRDEAESASRMKGEFLANMSHEIRTPMNAIIGMTELTLETPLSPSQRENLEIIGSSAESLLGLLNDILDFSRIEAGRLLLEKVPFDLRNTVEGALDVVAPQAHGKGLELILDVARDLPEAFIGDPTRLRQVLINLLSNAVKFTAKGEVGLKVERAPSSGTDDGVMLLFTVSDTGIGIPADKLSLIFESFTQADGSTTRKYGGSGLGLAICRALVSMMGGDISVKSAVGVGSTFRFTARLGTCALQNREIRQAGIPRFGREVKILLAEDNPMNLKVSRLLLEMMGCQVVAVENGGDVVSAMKGERFDVVLMDIQMPVLDGLEATRVIRSGSERGIDQTTPVIAMTAHALKGYEKVCHEAGMNDFISKPVRAGELYNVILRNLPPAPGGGGVTPSAL

SEQ ID NO: 9253 - protein, 119 aa, Zea mays
  misc_feature (21)..(21): Xaa can be any naturally occurring amino acid
  misc_feature (87)..(87): Xaa can be any naturally occurring amino acid
IYPSQATLIINALEKRNHNLXYILNTHHHYDHTGGNLELKEKYGAKVNCSEKDKDRIRGIDIILKEGDTWMFAGHSVHVLETPRHTXGHGCYYFAGCGAILTGDTLFNLSCRKLFQWSP

SEQ ID NO: 9254 - protein, 539 aa, Spinacia oleracea
MEVISRLTFASVSYPFISSNLNPTPMLNSFNFRVLSWNSAPTNVAEAHLHRLLLRKLNPANDRVVGISNFGCSCRLDLWPSWRRHKRLFFQNGVSTIRWEVKKCSPKFYKIVSNYEKCKRHIYVPSVRLVVGVVLLMSVSVALNQDPSWSLSEENRIFLEAWRTIDRAYVDKTFNGQSWFRYRENALRNEPMNSREETYTAIRKMVATLNDPFTRFLEPEKLKSLRSGTQSSLTGVGISIGPTAVDQSSTGLVVISATPGAPASRAGILPGDVILAIDDASTDKMGIYEAANILQGPDGSSVDLTICSRDEIKHVVLKRERITLSPVKSRLCEMPGSAKDAPPKVGYIKLTTFTENASDAVKEAIETLRSNNVNAFVLDLRDNSGGLFPEGIEIAKIWLNKGVIVYICDSRGVRDIYDVEGSSAVAGSEPLVVLVNKGTASASEILAGALKDKKRAVVFGEPTYGKGKIQSVFELSDGSGLAVTVARYETPAHTDIGKVGIKPDHPLPASFPKDENDFCTCVQDPSSTCYLNGVQLFSR

SEQ ID NO: 9255 - protein, 753 aa, Escherichia coli
MSQHNEKNPHQHQSPLHDSSEAKPGMDSLAPEDGSHRPAAEPTPPGAQPTAPGSLKAPDTRNEKLNSLEDVRKGSENYALTTNQGVRIADDQNSLRAGSRGPTLLEDFILREKITHFDHERIPERIVHARGSAAHGYFQPYKSLSDITKADFLSDPNKITPVFVRFSTVQGGAGSADTVRDIRGFATKFYTEEGIFDLVGNNTPIFFIQDAHKFPDFVHAVKPEPHWAIPQGQSAHDTFWDYVSLQPETLHNVMWAMSDRGIPRSYRTMEGFGIHTFRLINAEGKATFVRFHWKPLAGKASLVWDEAQKLTGRDPDFHRRELWEAIEAGDFPEYELGFQLIPEEDEFKFDFDLLDPTKLIPEELVPVQRVGKMVLNRNPDNFFAENEQAAFQPGHIVPGLDFTNDPLLQGRLFSYTDTQISRLGGPNFHEIPINRPTCPYHNFQRDGMHRMGIDTNPANYEPNSINDNWPRETPPGPKRGGFESYQERVEGNKVRERSPSFGEYYSHPRLFWLSQTPFEQRHIVDGFSFELSKVVRPYIRERVVDQLAHIDLTLAQAVAKNLGIELTDDQLNITPPPDVNGLKKDPSLSLYAIPDGDVKGRVVAILLNDEVRSADLLAILKALKAKGVHAKLLYSRMGEVTADDGTVLPIAATFAGAPSLTVDAVIVPCGNIADIADNGDANYYLMEAYKHLKPIALAGDARKFKATIKIADQGEEGIVEADSADGSFMDELLTLMAAHRVWSRIPKIDKIPA

SEQ ID NO: 9256 - protein, 155 aa, Petunia x hybrida
TLINRAGKATYVKFHWKPTCGVKSLLEEEAARVGGENHSHATQDLYDSIAAGNYPEWKLFIQTMDPAHEDSFDFDPLDVTKTWPEDILPLQPVGRLVLNKNIDNFFNENEQLAFCPSIVVPGVYYSDDKMLQTRIFSYSDTQRYRLGPNYLQLPA

SEQ ID NO: 9257 - protein, 540 aa, Rhodothermus marinus
MAAKQITFNADARMALKRGVDKLADAVKVTLGPKGRNVIIEKKFGAPTVTKDGVTVAKEIELEDKLENVGAQMVKEVASKTSDVAGDGTTTATVLAQAILTAGLKSVTAGANPMDLKRGIDKAVEVVVAELRKMSQEVQDKNRIAQVATISANGDKAIGQLIADAFEKVGKDGVITVEEAKGTETTLEVVEGMQFDRGYLSPYFVTNPDTMEAVLEDAYILIHDKKISAMKDLLPILEKVVQTGRPLLIIAEDVEGEALATLVVNKLRGVLKVAAVKAPGFGDRRKAMLEDIAILTGGTVISEEKGYRLENATLDYLGQAERIIVDKDNTTIVGGKGDPAQIKARANQIRQQIEETTSDYDREKLQERLAKLAGGVAVLKIGAATEPEMKEKKARVEDALHATRAAVEEGIVPGGGVAYIRAIAALDKVEVENEDQKIGVQIVQRALEEPLRQIAANAGWEGSIVVQRVKEGQGDFGFNAQTEEFGNLLEQGVIDPTKVARTALENAASVAGLLLTTEAVVAEKPEKEKAAAPSPGDMDF

SEQ ID NO: 9258 - protein, 305 aa, Arabidopsis thaliana
MSLSASEKEENNKKMAADKAEMGRKKRAMWERKWKRLDIVKAFASLFVHFLCLLAPFNFTWPALRVALIVYTVGGLGITVSYHRNLAHRSFKVPKWLEYFFAYCGLLAIQGDPIDWVSTHRYHHQFTDSDRDPHSPNEGFWFSHLLWLFDTGYLVEKCGRRTNVEDLKRQWYYKFLQRTVLYHILTFGFLLYYFGGLSFLTWGMGIGVAMEHHVTCLINSLCHVWGSRTWKTNDTSRNVWWLSVFSFGESWHNNHHAFESSARQGLEWWQIDISWYIVRFLEIIGLATDVKLPSESQRRRMAMVR

SEQ ID NO: 9259 - protein, 299 aa, Arabidopsis thaliana
MGDTTKDDGSSQSKAVRGEKRAFFFRKWTRIDIARASAVGAVHLLCLLAPFNYKWEALRFGVILAIVTSLSITFSYHRNLTHKSFKLPKWLEYPFAYSALFALQGHPIDWVSTHRFHHQFTDSDRDPHSPIEGFWFSHVFWIFDTSYIREKCGGRDNVMDLKQQWFYRFLRNTIGLHILTFWTLVYLWGGLPYLTCGVGVGGTIGYNGTWLINSACHIWGSRAWNTKDTSRNIWWLGPFTMGESWHNNHHAFEASARHGLEWYQVDLTWYLICFFQALGLATDVKLPTDAQKRKLAFAR

SEQ ID NO: 9260 - protein, 583 aa, Magnaporthe grisea 70-15
MCGIFACHAHPDVQKFKPTALRLAKAIRHRGPDWSGSVTCNQTILCHERLSIVGVESGAQPLTNEDESIILAVNGEIYNHRLVRKSLKTPYHFKTTSDCEVIIPLYMEHGLDAPKYLDGMFSFVLYDKKQNRTIAARDPIGVTTFYQGWSSSEPGAVYFGSELKCLYQVCDKIEAFPPGHIYDSLTGERTRYFQPTWWDPKRVPETPLDLTKLREALEKSVRKRLMAEVPYGVLLSGGLDSSLVASIAQRETKRLKKLAIEAGLEDLPAEPTGNHDQGEGLVGIDDENKLSTMTYLPQLNSFSIGLPGSPDNKAALEVAKFLGTKHHVMTFTIEDGLNALSDVIYHLESYDVTTIRASTPMYLLSRKIKAMGIKMVLSGEGSDEAFGGYLYFHNAPDKDAFHDETVRRVKNLHLSDCLRANKSTSAWGLEARVPFLDKEFLELAMNIDPKEKMITKERIEKYIVRKAFDTSDDPNAEPYLPDNILWRQKEQFSDGVGYGWIDALKDNAEIQVTDEMMKNPKPEWGDDIPDTKEAYWYRCMFDEHFPPHCASTVERWTPTWSKQTDPSGRAIAVHAAKYDHISE

SEQ ID NO: 9261 - protein, 469 aa, Streptococcus pneumoniae TIGR4
MKKKLVFPNLFWWGAASSGPQTEGQYGKVHENVMDYWFKTHPEDFFDNVGPLVASNFFHTYTEDFHLMKEIGVNSFRTSIQWSRLIKNLETGEPDPKGIAFYNAIIEEAKKNQMDLVMNLHHFDLPVELLQKYGGWESKHVVELFVKFAKTAFTCFGDKVHYWTTFNEPMVIPEAGYLYAFHYPNLKGKGKEAVQVIYNLNLASAKVIQLYRSLELDGKIGIILNLTPAYPRSNSPEDLEASRFTDDFFNKVFLNPAVKGTFPERLVKQLERDGVLWSHTEKELQLMKSNTVDFLGVNYYHPKRVQAQANPEEYQTPWMPDQYFKEYEWLERRMNPYRGWEIFPKAIYDIAMIVKEEYGNIPWFISENGMGVENEARFIDENGVIDDVYRIEFYEEHLRWLHKAIEEGSHCFGYHAWTAFDCWSWNNAYKNRYGFISVDLETQKRTIKSSGRWYRKVSDNNGFEVEIEE

SEQ ID NO: 9262 - protein, 1209 aa, Xylella fastidiosa Ann-1
MRCLKRVRGGLLTALLVFVSLLTATAAVPEMPRFRVLDATSGLPSNVVRAMLQDAAGYLWLATSDGLARYDGTAFKVWRHDPNDPGSLPGDSVLALYIDVQDRIWVLSENAGLAVLDAQRRRFIQIPVGSVAKTDALHTLTGHGDAIWLSDLHASVIRIDSAGALTRYALADVSPTLKDTPVVALTFDANGRLWVGTPDGLLYFEAGRLHLAPPPLDKASIHSIAAVGSRLWVGSTDGVYLQDAEGRWRAPNWGPMFAFGNLLLSVADAGDGEFWLGSERGLWRTRQERPPVQIPLSDMHHGVSTVSSLWRDTSGGLWVPVYGRGLGYLRQDWKRMAVVRPSDGGESSYCNVAPAAYSGGLWQLNRIGELMHLNTSTGELVHTGWQRHELRGVNITTTLEDSRGRLWLANMQNGLSRLDLKNGQWREWAAHGDDAVPLYGPISWIVEMPDSSLWLEALGVLQQRDLESGRVLNQIVPGSHGLDGSRVEQIGLGPDGRLWLAAGSGVYAWESQRRMFVPIPDLTGTRAYSFVPVGGNEVWVHRLRGLEQWRHSSHGWKRVALVGPQHGLPAMESLGMQHDAQGRIWLSTRRGLWRIDNTDELQVRNFGLRDGLGTQEFAEACLWMAPDGVLVGGTTDGYLMLFDTAMPDPAPFVPQLRMETVSVIRAGRRIDFPVDRPFELLPNDRQLIVGARLLSFGDPLSNRYSYWLKGFDTGWIDQGSSGTREFSSLPPADYTLLIQGTDPMGNLSRIHLVTFRVLPPWWRSAWGMSVLTGSGLLLLWGVSWNYHRRLRRRARLQLEQHQREVAERASLAKTQFLATLGHEVRTPMTGVLGMSELLLETPLDTRQHGYATSIQAAGKHLLRLVNDALDLAKIEAGKLSLERRDFDFHALLEQVVAMIRPMVERKGLRFVYRLDPEVPQYVHGDADRLQQILLNLLINATKFTEHGEVVLQVAPGQEQACLGVRIDVVDTGPGLSEEQCQRLFRRFEQVNGASTAARYGGSGLGLAICRELATVMEGEIHVDSELGKGTCFRVLLPLPWVLAVQPAVAVMDMEPSPCSNPLHLLLIEDDPTVAEVIVELLRVRGHRVTHALHGLEALVEVTLTRFDACLCDLDLPGLDGAGLIVQLRAQGQSFPIVVVTARTDADAQRQAFQVGCDAFLRKPVTGEMLEQVLTQVLSAPRQEVDVHTPKKRNGMGRPRISDSIKRDLG

SEQ ID NO: 9263 - protein, 238 aa, Arabidopsis thaliana
MALETLTSPRLSSPMPTLFQDSALGFHGSKGKRSKRSRSEFDRQSLTEDEYIALCLMLLARDGDRNRDLDLPSSSSSPPLLPPLPTPIYKCSVCDKAFSSYQALGGHKASHRKSFSLTQSAGGDELSTSSAITTSGISGGGGGSVKSHVCSICHKSFATGQALGGHKRCHYEGKNGGGVSSSVSNSEDVGSTSHVSSGHRGFDLNIPPIPEFSMVNGDEEVMSPMPAKKLRFDFPEKP

SEQ ID NO: 9264 - protein, 346 aa, Bacillus cereus ATCC 14579
MMNSKLFSPYTIKNVTLKNRIVMSPMCMYSSGNEDGRVTNFHLIHYGTRAAGQVGLVMVEATAVLAEGRISNNDLGIWDDNLIEGLHKTTTFIHDNGAKAAIQLAHAGRKAELDTNAFAPSAIPFNDKMKIPVEMNIQQIKETILAFQRAALRSKQAGFDVIELHGAHGYLINEFLSPLTNKRTDKYGGSPENRYRFLREIIDSVNEVWDGPIFVRISANDYHPDGLTVQDYVQYTKWMKEQGIDLIDCSSGAVVPAHIDVYPGYQVQYAKHIKEHTNIATGAVGLITTGSQAEQILNNNEADLIFIGRELLRNPYFPRIAANELGFELQEPHQYKRAPGKIHTNK

SEQ ID NO: 9265 - protein, 540 aa, Triticum aestivum
  misc_feature (106)..(106): Xaa can be any naturally occurring amino acid
  misc_feature (234)..(234): Xaa can be any naturally occurring amino acid
MEAAAELAQRLRAAANDRLAGQEPLLLVAAPLLALLAARAVHAAAADVADRGLRTVLITLAMAAVKLVPGVSGYIAAEKSKVVEQLQSGSASSKKNLRTELPAVGXPDGVIDELQALKDKDVRWQGKCSGTVYIAGSESEGHFSLINKAYSMFSHTNPLHQDVFKSVAQLEAEVVAMTAALLGSKEKASGGQICGNMTSGGTESILLAVKTSRDYMQSKKGITKPEIIIAESAXHSAYDKAAQYFNIKVRRVPVNKEFLADVKGFKRCINGNTIMMVGSAPGFPHGLIDPIEELGELASQYGICLHVDLCLGGFVLPFARKLGYPIPPFDFSVKGVTSISTDVHKYGLAPKGTSTVLYRNHEIRKHQFVAVTEWTGGLYISPTMAGSRPGGLVAGAWAAMMSLGLNGYLESTGKIMEVSRKIQKGIDDISGLFVIGKPDMTVVAFGSDAVDIFEVNDIMSSKGWHLNALQRPNSLHICVTLQHTAIYEEFLKDLEDSVNTVKANPGPISGGMAPIYGAAGKMPDRGTVKELLVEFMDSSC

SEQ ID NO: 9266 - protein, 471 aa, Listeria monocytogenes str. 4b F2365
MHTNTGFPANFLWGGAAAANQFEGAYNVDGKGLSVQDVTPKGGFGHITDGPTPDNLKLEGIDFYHRYKDDVKLFAEMGFKVFRTSIAWSRIFPNGDETEPNEAGLQFYDDLFDELLAHNIEPLITLSHYETPLHLSKTYDGWVNRKMIDFYENYVRTVFNRYKGKVKYWLTFNEINSILHAPFMSGGISTSPDKLSQKDLYQAVHHELVASALATKIGHEIMPEAQIGCMVLAMPTYPLTSNPDDIIAVMEAERKNYFFSDVHVRGTYPGYMKRYFRENNIELDVTEEDLEILKNTVDFISFSYYMSTTETADESKRKAGAGNILGGVQNPYLEASEWGWQIDPQGLRVVLNEFWDRYQKPLFIVENGLGAIDQLEKDENGNYTVNDDYRINYLSAHLSQVKEAIKDGVDLMGYTSWGCIDLVSASTAEMKKRYGFIYVDRNNDGTGTLNRYKKKSFGWYKNVIATNGEDL

SEQ ID NO: 9267 - protein, 279 aa, Caulobacter crescentus CB15
MSKLVPAVRSGDVLMPALGFGTWQLENGTAVPLVEKALEIGYRHIDTAQIYGNERDVGAAIRNSGVKRDEIFLTTKVWIDQFADGDLQRSAEKSLEKLGVDQVDLLLLHWPKPEVPLAETLKALNAVRAKGWTRAIGLSNFPSAQLEEAAKLSEAPIATDQVEYHPYLSLKTLKAKADQLGVSITAWSPLAQGKVAQDPVLIEIGRAHGKTPGQVTLRWIIQQGIIAIPRTSNPKRIEENFDILDFELSEKEMAQIHGLARPDGRIGDWIDRAYAWDAE

SEQ ID NO: 9268 - protein, 708 aa, Alkalilimnicola ehrlichei MLHE-1
MHWTESMKRQVIRPALVIAGILLALVLVISGNDGPGRPAPAVAHSELAPDSEQREKASVIADLLTRYHYRGQPLDAGLSERVFDAWLDQLDRERFYLLQEDIDAFDEHRIGLHEQLRHGDLSVPFALYERYRERVAERTEYAIGLLEAGLDFDTDLRFEQDRRDADWAESREALDRLWRKRVTHDALTQKLAGRDEEQVIQTLTQRYERIRRTTEQESGEDVFQRYMDAWAHAFDPHSSYLSPRRSEDFDINMSLSLEGIGAMLQSEHDFVTIVELVPGGPAAQSEALSPGDRIIGVAEGEDGEMKDVVGWRLSDVVDLIRGPRGSVVCLLVLPEAGSGNATPREVVLERNEIKLEDQAASAEVIEVPGEGSGKDRIGVITIPAFYMDFEAAEAGDPDYRSTTRDVRRLLNELKEGGIDGLVLDLRGNSGGSLREAASLSGLFMGGGPIVQVRRSSGELEVLRGGDRANSAPLYDGPLGVMVDGFSASASEILAGAIQDYGRGVIMGKDTFGKGTVQTMINLDRFGLGNGEDGAGRLKLTVAKFYRVTGDSTQKKGVQPDIILPSPIDASEFGERGIDNALPWNQISAVDYRRDDTLEELIPALRSRYQTRAEDDPQFQALLRDFEYQLQRRERTDVSLNETTRKQERDAEEQERLALHNARREAAGLEPLEDAESRDDDELPDVLLEAAASVIADLRRLQAAYMAQR

SEQ ID NO: 9269 - protein, 498 aa, Magnetospirillum magnetotacticum MS-1
MCGIAATIGLSDATAFTSLFGAIGHRGPDESGIRESGDIRIGMHRLAIVGRMGDSVPLIGADGLVLAFNGEIYNHQALRADFPDYPFAGQSDAEVLFPLLKRHGLGGLDRLRGMFAFVLTDMESGEFLAVRDPFGIKPLYYAETGGGFAFASEMKAFAAMGITPRFLPPGHLLTRHGLRRWYRVPGRFRLSRRPNLRALLERAVASHLPPEGPCGVFLSGGLDSSLVAALAARSRPDMVAYSVVLPGSPDEEPAALMAAHLGIRHKVLRATADDIRAALPEVIGALESFNPIMVRNAVPLYLLSKMAAKDCKVVLGGDGADELFAGYDYLSRVPRRFWPQAMDYGFSNLHRTELQRVDRMTMAHGLELRVPFLDREVAEAAVNLPLSAKFGIKDGTPMPKLALREAAEGLLPPSIQWRRKLPLADGSGFGGLDLGAGRDKADPVPGWDVGDEDAVAFFPLWRVRFPLARPDSAIWRDCGRYHDFEECHGRPLLELFRR

SEQ ID NO: 9270 - protein, 472 aa, Escherichia coli O157:H7
MTTHLVWFRQDLRLHDNLALAAACRNSSARLLALYIATPRQWAAHNMSPRQAELINAQLNGLQIALAEKGIPLLFREVDDFAASVEIVKQVCAENSVTHLFYNYQYEVNERARDVQVERTLRNVVCEGFDDSVILPPGAVMTGNHEMYKVFTPFKNAWLKRLREGMPECVAAPKVRSSGSIKPAPSITLNYPRQSFDTAHFPVEEKAAIAQLRQFCQNGAGEYEQQRDFPAVEGTSRLSASLATGGLSPRQCLHRLLAEQPQALDGGAGSVWLNELIWREFYRHLMTYYPSLCKHCPFIAWTDRVQWQSNPAHLQAWQEGKTGYPIVDAAMRQLNSTGWMHNRLRMITASFLVKDLLIDWREGERYFMSQLIDGDLAANNGGWQWAASTGTDAAPYFRIFNPTTQGEKFDREGEFIRQWLPELRNVPGKSVHEPWKWAEKAGVKLDYPQPIVEHKEARVQTLAAYEAARKGK

SEQ ID NO: 9271 - protein, 732 aa, Xanthomonas campestris pv. vesicatoria str. 85-10
MMSGVMTAVSNRWDPGAVRALAEARHGDAFAVLGAHPSDNGRFLRTYLPGADRVSAVLDDGQVVALDAGPEPGLFAGELPAHGGYRLRIGWPGGEQETADPYAFGPQLSDFDLHLISEGHHLQLADALGANVVEVDGVRGTRFAVWAPNASRVAVVGDFNSWDARRHPMRLRHQAGVWELFVPDVGPGAHYKYQLRGPHGHELPAKADPVARRAELAPGTASIVADPTPHQWSDDGWMATRARRQAHDAPMSIYEIHAGSWLREAGLDLDWDGLADRLIPYVADMGFTHVELMPVSEHPFGGSWGYQPLGLFAPTARFGTPDGFARFVDRCHREGIGVIVDWVPAHFPTDAHGLAHFDGTALYEHADPREGFHRDWNTLIYNHGRREVSGFLIASAMEFLQRYHVDGLRVDAVASMLYRDYSRNAGEWIPNIHGGRENYETIAFLRRLNEVVREHTPGAVMIAEESTAFPGVTADVAHGGLGFHYKWNMGWMHDTLHYAGLDPIYRRYHHGELTFSMVYAYSERFVLPISHDEVVHGKGSLLGRMPGDDWQRFANLRAYLGFMFTHPGRKLLFMGCEFGQPTEWNHDAGLPWHLLDDPRHRGVQTLVRDLNRLYVQYPALHAHDDDPSGFAWVVGDDAGNSVVAFLRKGKRGDAPVLVVINFTPVVQHGYRIGVPQGGQWREVFNSDAGIYGGSNLGNGGSVTAEQQSMHGHAQSLPLLLPPLGAIVLTPYG

SEQ ID NO: 9272 - protein, 474 aa, Clostridium acetobutylicum ATCC 824
MLSEFPKNFLWGASSAAYQVEGAWKEDGKGESVWDNFSKIPGKTFEGTNGDVAVDHYHRFKEDVALMAEMGLKAYRFSVSWSRIYPKGRGKVNLKGLEFYKNLVDELLKYNIEPVLTLYHWDLPQALQDLYGGFESRNVISDFENYCITLFKNFKDKVKYWITFNEQNVFTNLGYRCAVHPPGIKDIKKYYLANHIVNLANASAIKAFRKYVPNGKIGPSFGMGPVYSFDCKPENVLAGDEAEEYFNHWWLDVYCFGKYPTITLNRLEKLKVMPEITKEDLQLLREAKPDFIGLNYYHGGTVMANDNVIRENLDKKDPYLVENSEEDKGFKYISNPFLKKTEWNWEIDPQGLRIALRRLTNRYNLPILITENGIGAVDRLEEDERINDDYRIEYLKAHVLACKEAIDDGVQLIGYLPWSFTDLLSWLNGYKKRYGFVYINRDEHSQKDLRRIKKKSFYWYKDVIEKNSDNIYGR

SEQ ID NO: 9273 - protein, 366 aa, Prunus persica
QMGLAENQVSFDLLEKYLEEHSEASKWGSKGVPCFRENALFQDYHGLVSFRKAMASFMGQIRGGRAKFDPDRIVLTAGATAANELLTFIIADPGDALLVPTPYYPGFDRDLRWRTGVNIVPIHCDSSNNFQITPQALEAAYKDAEAKNMRLRGVLITNPSNPLGATIQRVVLEEILDFVTSKNIHLVSGEIYSGSTFSSSAFVSIAEILEARQYKNSERVHIVYSLSKDLGLPGFRIGTVYSYNDKVVATARRMSSFTLISSQTQHLLASMLSDKEFTENYIKTNRERLRKRYDMIIEGLKKAGIECLKGNAGLFCWMNLSPLLEKPTRGGELALWDSMLHEVKLNISPGSSCHCSEPGWFRVCFA

SEQ ID NO: 9274 - protein, 57 aa, Brassica oleracea
RIRSKKNELLFAEIDYMQKREVDLHNDNQLLRAKIAENERNNPSMSLMPGGSNYEQI

SEQ ID NO: 9275 - protein, 366 aa, Prunus persica
QMGLAENQLCFDLIEEWVLKNPEASICTAAGVNEFKDIAIFQDYHGLPEFRNAVANFMGKTRGNQVTFDPDRIVMSGGATGAHEMIAFCLADPGDAFLVPVPYYPGFDRDLGWRTGVQLIPVACVSSNGFKVTRAALEAAYEKAQKDNIRVKGLLITNPSNPLGTVLDRETLRSLVAFINEKKIHLVCDEIYAATVFSQPSFISIAEIIEEDIGCDRNLVHIVYSLSKDMGFPGFRVGIVYSYNDAVVNCARKMSSFGLVSTQTQHLIASMLSDNDFVDRFIAQSAKRLKARHMRLTMGLAQVGTSCLKSNGGLFVWMDLRQLLKEQTFEAEMALWHTIIHEVKLNVSPGSSFHCPEPGWFRVCFA

SEQ ID NO: 9276 - protein, 102 aa, Oryza sativa
MSSDGGPVLGGVEPVGNENDLHLVDLARFAVSEHNKKANSLLEFEKLVSVKQQVVAGTLYYFTIEVKEGDAKKLYEAKVWEKPWMDFKELQEFKPVDASANA

SEQ ID NO: 9277 - protein, 82 aa, Brassica rapa
PKELRNLEGRLDRSVNRIRSKKNELLFAEIDYMQKREVDLHNDNQLLRAKIAENERNNPSMSLMPGGSNYEQIMPPPQTQPQ

SEQ ID NO: 9278 - protein, 73 aa, Brassica oleracea
LEGRLDRSINRIRSKKNELLFAEIDYMQKREVDLHSDNQLLRAKIAENERNNPSMNLMPGGSNYEQIIPPPQT

SEQ ID NO: 9279 - protein, 188 aa, Arabidopsis thaliana
  misc_feature (177)..(177): Xaa can be any naturally occurring amino acid
MANNDEITTSSHASPAVNHESISRAKQRIKDGLATRRSWRVMFDLHSTGLPHGVSDVFSRIKTNLAYFRSNYAIVILNVIFFSLIWHPTSLIVFTGLVFLWIFLYFLRDVPLKVFRFQIDDRAVLIGLSVITIVLLLLTNATFNIVAALMAGAVLVLIHAVIRKTDDLFLDEEAATXETSGLTSHPSS

SEQ ID NO: 9280 - protein, 681 aa, Nicotiana sylvestris
MSGSGCSIVWFRRDLRVEDNPALAAGVRAGAVIAVFIWAPEEEGHYYPGRVSRWWLKQSLAHLDSSLKSLGTSLVTKRSTDSISSLLEIVKSTGATQLFFNHLYDPISLVRDHRAKEVLTAQGISVRSFNADLLYEPWEVNDEEGRPFTTFSAFWEKCLSMPYDPEAPLLPPKRIIPGDASRCSSDSLVFEDESEKGSNALLARAWSPGWSNADKALTTFVNGPLLEYSQNRRKADSATTSFLSPHLHFGEVSVRKVFHFVRIKQVLWANEGNKAGEESVNLFLKSIGLREYSRYMSFNHPYSHERPLLGHLRYFPWVVDEGYFKAWRQGRTGYPLVDAGMRELWATGWLHDRIRVVVSSFFVKVLQLPWRWGMKYFWDTLLDADLESDALGWQYISGTLPDGREFDRIDNPQFVGYKCDPHGEYVRRWLPELSRLPTEWIHHPWNAPESVLEAAGIELGSNYPLPIVEIDSAKVRLEQALSQMWQHEAASRAAVENGMEEGHGDSADSPIAFPQAMHMEMDHEPVRNNNPVIVTVRRYEDQMVPSMTSSLFRVDDEETSVNIRNSVVDTRAEVPNDVNVTEGPRRDTLDQAVTQPARTNTTPPQFNFVVGRRNSEDSTAESSSSTRERDGGVVPVWSPSSTNYSDQYVGDDNGIGTSSSYLQRHPQSHQLMNWQRLSQTG

SEQ ID NO: 9281 - protein, 641 aa, Nicotiana sylvestris
MESNSKTIVWFRRDLRIEDNPALAAAARNGSVFPVFIWSPKEEGQFYPGRVSRWWLKQSLIHLEQSLKSLGAELVLIKAQSTLSALLDCIEAVGATKVVYNHLYDPVSLVRDHNIKQKLGELGISVQSYNGDLLNEPWEVYDDDGKVFTTFDAYWEKSLRLQKEPVSHLPPWKLIPAAGSVKMCSVEELGLENESEKSSNALLGKGWAPGWSNADKALTEFVENQLLAYSKDRLRVGGNSTSLLSPYLHFGEVSVRKVFNSVRLKQILWTKEGNSVGDESASLYLRAIGLREYSRYICFNFPFTHERSLLNNLKFFPWNADQARFKAWRQGRTGYPLVDAGMRELWATGWIHNKIRVIVASFFVKFLLLPWQWGMKYFWDTLLDADLESDIIGWQYISGSLPDGHELERLDNPEVQGFNYDPEGEYVRHWLPELARMPAEWIHHPWDAPLTVLKAAGVELGMNYPNPIIDVDVARDRLMQAIFIMREKEAAANAADANGTNEVVFDNSENVGDSVNPKVVKGKVPCPSSSSYDQRVPSMQKGSTNKKRPNPVEEEKKFKDNWLSCKIKTEGKISKADDDLCSTAESSSMKKQMTTSRNSFSVPQAISMSYDIKSFDGEASSHVKLQNEEEIDMEINSCKNE

SEQ ID NO: 9282 - protein, 296 aa, Saccharum officinarum
MSGGGQDLQLPPGFRFHPTDEELVMHYLCRRCASLPIAVPIIAEIDLYKFDPWQLPRMALYGEKEWYFFSPRDRKYPNGSRPNRAAGSGYWKATGADKPVGTPKPLAIKKALVFYAGKAPKGEKTNWIMHEYRLADVDRSARKKNSLRLDDWVLCRIYNKKGGLEKPAAASSGDHKPMVFAAGAVSSPPEQKPFVATPGGLPPAAFTADLAAYYDRPSDSMPRLHADSSCSEQVLSPEQLACDREVQSQPKISEWERTFASDPVNPAGSMLVDPVVGGHAGDPLLQDILMYWGKPF

SEQ ID NO: 9283 - protein, 157 aa, Triticum aestivum
MAGMVFGLDAPMMAALQHLLDIPDGEAEPPPEKQGPTRAYVRDARAMAATPADVKELPGAYAFVVDMPGLGSGDIKVQVEDERVLVISGERRREEKEDAKYLRMERRMGKLMRKFVLPENADMEKISPCRDGVLTVTVDKLPPPEPKKPKTIQVQVA

SEQ ID NO: 9284 - protein, 454 aa, Aeropyrum pernix K1
MEEVVKRLAEIRAMDARGEGGRLFTYLYETGDPGVKEVSLRAFEMFLDTNALDPTVFKSALFFERELVSFASSLAGGVEGVVGTVTYGGTESIILAAMAAREWYRSLGGSRTPGIVAPQTVHPSVRKAARYLGMRLSIAPVDPGSKRVDIDSLVSLVDDRTAMVVVSAPNYPYGTVDDVRSVAEALSSQRVWLHVDACVGGFILPFMRELGLYSGAFAFDVEGVYSVSMDLHKYGYSPKGASVLLFRDGSLKKHSIFADLRWPGYPFINTTVLSSRSVAPLAAAWAVTNYLGRRGYLELARKAVEARDEIMRGLESIGFRSLAPIESTILSVALDDPADTLRFHANMSRRGWILGLQPGVEGLAPPNIHLTISPIHKLVSPQFLGDARASSSEPLPKELEEAWRLLESRGPLELAGMIGRTQYDQVIIAWILSSIPPDLAEDLARELTVEVYRG

SEQ ID NO: 9285 - protein, 335 aa, Polaromonas sp. JS666
MSQRISLTRYLVEQQRREGHIPAQLRLLLEVVARACKGISQSVNKGALGGVLGTAGSENVQGEVQKKLDIIANEVLIEANEWGGHLAAMASEEMDSIYLVPNRYPQGEYLLLFDPLDGSSNIDVNVSIGTIFSVLKKPDDHAGVEEKDFLQPGNKQVAAGYCVYGPQTTLVLTVGDGVAMFTLDREQGSFVLIEENVRIPEDTKEFAINMSNMRHWDAPVKRYIDECLQGTEGPRGKDFNMRWVASMVADVHRILSRGGIFMYPWDKREPEKAGKLRLMYEANPMGWIVEQAGGSATNGKQRILDIQPGKLHERVSVILGSKNEVERVTGYHSGL

SEQ ID NO: 9286 - protein, 443 aa, Colwellia psychrerythraea 34H
MTVKLTLPTQSKMLSKDFVYGVATASFQIEGGKASRLPCIWDTFCDTPNTIADGSNGEMACDHFNRWQDDIELIDSIGVDAYRLSISWPRVITESGELNQEGVAYYMNILDTLKSKRIKAFVTLYHWDLPQHLEDKGGWLNRETAYEFRNYANLISKVFGNRVHAYATLNEPFCSAFLGYEVGTHAPGIIGKEFGKKAAHHLLLAHGLAMEVLAKNSPNTLNGIVLNFTPCYPESESLADINAAAFADDYFNQWYIKPLFDGKYPEILSTLPAAHQPDIHEGDMAIIAHSMDYLGVNFYTRAIYRADVDEHFLQIDPPEPRTDIGWEIYPKAFTELLVSLNEKYRLPPVYITENGAAMADKIIDGVVNDQDRVDYYQQHLNAVNDAIEQGVKVDGYFAWSLMDNFEWAEGYLKRFGIVYVDYETQVRTIKASGFAYKALITNR

SEQ ID NO: 9287 - protein, 464 aa, Caulobacter crescentus CB15
MRKYLLIGVSAFVLGAGTMAYISPIAQANNAPKAQTYKLLELFGDVLGTVEDQYVTEVDDKKLIEAALDGMLTSLDPHSGYLAPDAFEDMQDTTRGEYGGLGLEVTSEEGVVKVISPMDGTPASRAGIQAGDYITAVNGQSVLGLTVNEAVKQMRGTAGEAVTLTIAREKTDPFDVKLVREVIKPKAAIARMEGDYGYVRLPGFNEKATDALASSVSELKSKNPKMKGLILDLRNNPGGLLDQAVGVADVFLDGGEVVSQRGRDPRNIQRYNARGGDMLNGLPMVVLINQGSASAAEIVAGALQDRKRAEVVGLTSFGKGSVQTVIPLRGGADGALKLTTARYFTPSGRSIQKTGIAPDLEVAQTRDQAQDIANRVWFSEASFKNALNADEGKSRVGAHTPAEAPPTGFDDKKGDFQLQRAIAVLQAGGVAKTPKLPKPAAKVAEVTAKAAAAAGGKTPVTEVK

SEQ ID NO: 9288 - protein, 664 aa, Listeria monocytogenes EGD-e
MTDYPSIFEPLTVKRMTIKNRVIMPPMGTNLAGLNGEFLEEHMNYYEQRAKGGTGLITIENACVDFPYGTNGTTQLRIDNDQYIPGFYKLTERLHKHGTCVSIQINHAGASAYPARLNGLQPVSASDIPSKKGGTVPRPLTVEEIYEIVNKYGDAARRAQQAGFDAVEIHGGHSYLLCQFLSPLYNKRTDEFGGTPENRARIVKLILEKVRAEVGPFFPIVLRFSADEFTEGGNHLEDILELLDYCQEEADILNVSAAINDNLYLQIDQMNLEDGWRSYLAKAVKDKFNKPTITSGNIRSPKAAEKILSEGYADLLAMGRGLIAEPNWVNKVATGQEDMLRKCISCNIGCADHRISKSKPIRCTVNPDIIHEDKYKETKVTRPTNVVVIGGGTAGLEAACTAAEVGCNTTLIEANEQTGGLARAIANLPDKSRIADFPNYLANRAEKLTNLKVITGTKADTALIDTFNPDVVVNATGSKPLLPPIKGLLDVIDKEGSKVHSIFGLISNIDDFTEFSNKKVAVIGGGAVGLDVVEYFSERGSDVTIVEMMPLLGKDLDMITRLSMMDIIEKNHVDVQTETALTEVAADHFKVKHDGVDAEIPFDYGFVCLGMRPERPLMEELAAYGKEKQIEIVNIGDSAATRKILEGVREGRNILTTLEKIGSL

SEQ ID NO: 9289 - protein, 538 aa, Zea mays
MALPKIPMRHHKAPAPVSCEGASELARKDPDSPTPASHKVQPRCYRNAEKCLTLPESATCAVAATATASTSRTGRFIGLVAGFSGTSKKGRRWAAMEDAMAADGKSVLQGRYELGRVLGHGNFGRVHAARDLRTGRSVAVKVVAKDKLERAGMAEQIKREIAVMKMVSHPNIVELHEVMATRSKIYLALELVRGGELFSRIARAGRVREDVARCYFRQLVAAVDFCHGRGVFHRDLKLENLLLDEVGNLKVADFGLSALAGHARSDGLLHTACGTPSYVAPEVLGGKGYDGAKADLWSCGVILYVLLVGSLPFHEDNLMVMYRKMQRGEFLCPPWVSADARKLIGELLDPDPSTRITVARLVETPWYRKPLPVLPPLNLKEPTPDARRATSDKEEPEVLNAFHLISFSEGFDLSPLFDQGRGGGVGRSSAGGIRFVTREAASSVVSRLESLVTGRGANMRVTKSGSRGVRLEAVSRGRSGARLAVAAEIFSVAPSVLLVDVKKDGGDTMEYRSFCSEELRPALKDIVWASSQDTPGAA

SEQ ID NO: 9290 - protein, 612 aa, Arabidopsis thaliana
MKMDKKTIVWFRRDLRIEDNPALAAAAHEGSVFPVFIWCPEEEGQFYPGRASRWWMKQSLAHLSQSLKALGSDLTLIKTHNTISAILDCIRVTGATKVVFNHLYDPVSLVRDHTVKEKLVERGISVQSYNGDLLYEPWEIYCEKGKPFTSFNSYWKKCLDMSIESVMLPPPWRLMPITAAAEAIWACSIEELGLENEAEKPSNALLTRAWSPGWSNADKLLNEFIEKQLIDYAKNSKKVVGNSTSLLSPYLHFGEISVRHVFQCARMKQIIWARDKNSEGEESADLFLRGIGLREYSRYICFNFPFTHEQSLLSHLRFFPWDADVDKFKAWRQGRTGYPLVDAGMRELWATGWMHNRIRVIVSSFAVKFLLLPWKWGMKYFWDTLLDADLECDILGWQYISGSIPDGHELDRLDNPALQGAKYDPEGEYIRQWLPELARLPTEWIHHPWDAPLTVLKASGVELGTNYAKPIVDIDTARELLAKAISRTREAQIMIGAAPDEIVADSFEALGANTIKEPGLCPSVSSNDQQVPSAVRYNGSKRVKPEEEEERDMKKSRGFDERELFSTAESSSSSSVFFVSQSCSLASEGKNLEGIQDSSDQITTSLGKNGCK

SEQ ID NO: 9291 - protein, 371 aa, Burkholderia fungorum LB400
MSTDSARIDSYLFEPVELGPLQLPNRIVMAPLTRSRAKEGDVPGELAIEYYAQRASAGLIIAEATQISPQGKGYVFTPGIYNDAQVQAWKRITGAVHEKGGRIFLQLWHVGRISHPSLQPGNALPVAPSAIKPEGQAYTNEGFVPLVTPRALETSEIAGIVEQYRVAAQNAKAAGFDGVEIHAANGYLLDQFLRDKTNRRTDQYGGSIGNRARLLLEVADAVTGVWGSDRVGVRISPLSSFGDIADSNPEPLFTYVVQQLSARKLVYLHVIEGDTGGPRDVPGGFDLQVLREAFDGLFMANNGYDMELAQRTLKAKRADLIAFGRPFISNPDLVARLRSGAPLNEPDKDTMYGGGAEGYIDYPTMEQEAKR

SEQ ID NO: 9292 - protein, 464 aa, Clostridium perfringens str. 13
MLFGKNELGSQFETPIFGTVESNESIPKYELAKKSIAPQVAYRLIKDDLLDEGNARQNLCTFCQTYMDDEAVKLMAETLEKNAIDKSEYPQTTDLENRCVNILADLWHAPKDESFMGTSTVGSSEACMLGGMAMKFRWRNRAKALGMDVTSRKPNLVISSGYQVCWEKFCVYWDIEMRLVPMDEEHMSINVDKVLDYVDDYTIGVVGILGITYTGKYDDIKALDKKLEEYNKTAKLTVPMHIDAASGGMFAPFIEPELEWDFRLKNVVSISTSGHKYGLVYPGIGWVLWRDKEYLPQELVFDVSYLGGKIPTMAINFSRSASQIIGQYYNFLRYGFEGYRQIHQRTKDVAMFLASELEKTGLFQIYNNGENLPIVCYKLRDDVNVDWTLYDLADRLLMKGWQVPAYPLPADLQDTIIQRIVCRADLSHNLAELYLRDLKAAIEDLNNARVLNQKSKTGVQGFTH

SEQ ID NO: 9293 - protein, 894 aa, Musa acuminata
MNSVRSGFLIQAAFLVMISGSSNMGVSGLGSMSSIAVSYGENGPVFCGLSSDGSHLVACFGADASIVYGAPLRLPLLGLTAGDGFVCGLLLDTGQPYCWGSNIFVKMGVPQPMAEGASYSEISAGDDHLCALRKPAIDSRKGASLIDCWGYNMTASHEFDGSVAAITAGSVFSCGMFIHNRTAFCWGDETSSGVISLTPRNLRFQSISAGGFHVCGILENSQVFCWGRSLETQQLSLGHGDVKMVPMDPMVSVAGGRFHACGIKSLDHKAVCWGFMLQNSMPPPKDSRLYEIAAGDYFTCGVLAATSLRAVCWGTGVPWSIPMAVSPGICASNPCGQGYYEFSHTSWGNKVCKPADSRVCLPCSVGCPEGTYESTPCNLTSDHGCEFNCSSCASVECSSFCSSQKESKSKRLLSLQMPIFIAEIVFAIIFVSSVFLVACLYARHRLQSCRCLESAVTTSRKRTYSFHKEMVKVRPDLEELKIRRAQMFTYGELEKATSGFSEESLVGKGSFSCVFKGVLKDGTVVAVKRAIRVSDVKKNSKEFHTELDLLSRLNHAHLLNLLGYCEEGGERLLVYEFMAHGSLYRHLHGKDLCLRKRLDWVRRVTIAVQAARGIEYLHGYACPPVIHRDIKSSNILIDEEHNARVADFGLSLLGPVDSSSPLSEPPAGTLGYLDPEYYRLHYLTTKSDVYSFGVLLLEILSGRKAIDMQFEEGNIVEWAVPLIKAGDISAILDPVLKPPADLEALKKIAAMASKCVRMRGKDRLSMDKVTTTLERALALLMGSPCNEQPILPTEVVLGSSRLHNKASQRSSNRSCSENDTDDQIYEYRAPSWITFPSVTSSQRRKSSASEGDAEGKNSEGRSLGHGGAGDGLRCLEEEIGPASPQENLFLQHNF

SEQ ID NO: 9294 - protein, 187 aa, Equisetum arvense
DEHGEVVAEIRRADLEPYLGLHYPATDIPQASRFLLMKNRVRMIHDCRAPPIRVIQDEHLPQPLSLAGSALRAPHGCHAQYMENMGSIASLVMAVTLNDNEFDNANESLKRRKLWGLIVCHHTSPRAVPFLRSACEFLMQVFGLQLNMEVELAAQMREKHILRTQTLLCDMLLRDAPIGIVTQSPNI

SEQ ID NO: 9295 - protein, 199 aa, Brassica rapa subsp. pekinensis
MAMLGGVRDVPSNENSVEVESLARFAVDEHNKKENALLEFARVVKAKEQVVAGTMHHLTLEIIEAGKKKLYEAKVWVKPWLNFKELQEFKPSTTITPSDLGCKKGEGASGWREVPGDDPEVQHVADHAVKSIQQRSNSLFPYELQEVVHANAEVTGEAAKYNMVLKLKRGEKEEKFKVEVHKNHEGVLHLNHMEQQHHD

SEQ ID NO: 9296 - protein, 205 aa, Colocasia esculenta
MALMGGIVDVEGAQNSAEVEELARFAVDEHNKKENALLQFSRLVKAKQQVVSGIMHHLTVEVIEGGKKKVYEAKVWVQAWLNSKKLHEFSPIGDSSSVTPADLGVKRDAHEAEWLEIPTHDPVVQDAANHAVKSIQQRSNTLFPYELLEILHAKAKVLEDLAKIHLLLKLKRGSREEKFKVEVHKNIEGTFHLNQMEQDHSDSGN

SEQ ID NO: 9297 - protein, 312 aa, Arabidopsis thaliana
MAQQGQGSMDPAVLDDIIRRLLDYRNPKAGTKQAMLNDSEIRQLCFVSREIFLQQPCLLELAAPVKICGDIHGQYSDLLRLFEYGGFPPAANYLFLGDYVDRGKQSLETICLLLAYKIKYPENFFLLRGNHECASINRIYGFYDECKRRFNVKLWKVFTDTFNCLPVAAVIDEKILCMHGGLSPELINVEQIKNIERPTDVPDAGLLCDLLWSDPSKDVKGWGMNDRGVSYTFGADKVAEFLIKNDMDLVCRAHQVVEDGYEFFADRQLVTMFSAPNYCGEFDNAGALMSVDESLMCSFQILKPVDRRSRFF

SEQ ID NO: 9298 - protein, 182 aa, Trichoderma atroviride
  misc_feature (56)..(56): Xaa can be any naturally occurring amino acid
QRQAEGKPTDKPNIIMSSAVQVCWEKAARYFEVEEKYVYCTPDRYTIDPQQAVDLXDENTIGIAAILGTTYTGHYEDVKGINDLLEEKGLDVSIHVDAASGGFVAPFVLPDLEWDFRLPRVVSINASGHKYGLVYPGVGWVVWRSHEYLPQDLIFNINYLGAEQSSFTLNFSKGASQVIGQY

SEQ ID NO: 9299 - protein, 371 aa, Burkholderia fungorum LB400
MNASSELKLLSPARVGPLSLAHRVVLAPMTRLRSDADDSPSAMMVEYYRQRASQGGLLITESAHPSYDSRGYIGAPGIYTNAHVEAWRKITDAVHARGARIFMQIAHDGRQSHVDLSWGNAPVAPSVVPYETTVFTQNGWVPNSPHRALELDEIPALIRSFRDAAARAKDSGFDGVELHNANGYLADTFLQDGTNKRTDAYGGSVEKRARFSLEAVEAFASVWGADRVGVRVSPSGRWGAISDNHPEATFGYFAQRLNEYGLAYLHVIEPRVMGTETLTEGEAPVASAFLRKVFTGPIIAAGGFDRDGAEQILQRGDADLVAFGRWFSSNPDLPERFRLGHALAPYNREAFWGGDERGYIDFPSLPEHAAA

SEQ ID NO: 9300 - protein, 547 aa, Corynebacterium efficiens YS-314
MAKIIAFDEEARRGLEKGLNTLADAVKVTLGPKGRNVVLEKAWGAPTITNDGVTIAREIELEDPYEKIGAELVKEVAKKTDDVAGDGTTTATVLAQALVKEGLRNVAAGSNPMGIKRGIEQAVATVTEKLLESAKEVETEEQIAATAGISAADPAIGAQIAKAMYAVGGGKLNKDSVITVEESNTFGVELEVTEGMRFDKGYISGYFATDMERLEAVLEDPYILLVSGKISNIKDLLPLLEKVMQSGKPLLIIAEDVEGEALSTLVVNKIRGTFKSVAVKAPGFGDRRKAQLQDIAILTGGQVISEEVGLSLETADLPLLGQARKVVVTKDDTTIVDGAGSEEQIEGRVNQIRAEIENSDSDYDREKLNERLAKLAGGVAVLKVGAATEVELKERKHRIEDAVRNAKAAVEEGIVAGGGVALIQAAHVLDNDLDLTGDEATGVRIVRDALTAPLKQIAANAGLEPGVVADKVSRLPEGEGLNAATGEYVDLMAAGINDPVKVTRSALQNAASIAALFLTTEAVVADKPQPAGAAMPGADEMGGMGGF

SEQ ID NO: 9301 - protein, 275 aa, Agrobacterium tumefaciens str. C58
MGKSGRRMRRFWPANGEDTMKPLEIDVFLCRSDNFGVLLHDPESGATAAIDAPEEGPILRALDGHGWKLTHIFTTHHHQDHVEANLVLKDKFRCEVHGPYDEAIAIPGLDRSQADGDEFEFAGRRVQVIATPGHTAGHICYYLPDDGLLFAADTLFAMGCGRLFERPAADMWHSFQKLMALPDDTRVYFGHEYTLSNARFALTVDPDNAVLRERAARVETARQANEFTIPTTIGLEKQTNPYMRVADAGIRRHLGLEGAADADVFAEIRTRKDNF

SEQ ID NO: 9302 - protein, 177 aa, Helianthus annuus
MSIVPSLFGSRRSSIFDPFSLYVWDPFRDFPISTSSEVSRETSALVNARVDWKETPEAHVFKADLPGIKKEEVKVEVEDGNILQITGERNVEKEDKNDKWHRVERSSGKFTRRFRLPENAKMDQVKAAMENGVLTITVPKEEAKKPDVKSIEISVKKIYEFARFIVLDRLYDLYVFI

SEQ ID NO: 9303 - protein, 314 aa, Aspergillus nidulans FGSC A4
MSLADTTYKLNTGAEIPALGLGTWQSAPGEVSAAVYHALKVGYRHIDAAQCYGNETEVGEGIKRALSEGIVKRSEIFVTTKLWCTYHTRIQQALDLSLSKLGLDYVDLYLVHWPLAMNPNGNHDLFPKLPDGSRDLVREHSHVTTWKGMEELITNNPDKVKAIGVSNYSKRYLEQLLPQAKIVPAVNQIENHPALPQQEIVDLCKEKGILITAYSPLGSTGSPLFKAEAIVAVAERRGVTPASVLLSWHLARGSSVLAKSVTPSRIEENRKLVKLEPEDVELIGKYSAELAATNGFQRYVYPPFGVDFGFPDKS

SEQ ID NO: 9304 - protein, 155 aa, Helianthus annuus
MSIIPSLFAGRRSSVFDPFSLDVWDPFRDFPISSSSDVSRETSALVNARVDWKETPEAHVFKADLPGIKKEEVKVEVEDGNILQITGERNVEKEDKNDKWHRVERSSGKFTRRFRLPENAKMDQVKAAMENGVLTITVPKEEVKKPDVKSIEISG

SEQ ID NO: 9305 - protein, 81 aa, Brassica rapa
  misc_feature (57)..(57): Xaa can be any naturally occurring amino acid
PKELRNLEGRLDRSINRIRSKKNELLFAEIDYMQKREVDLHSENQRLRAKIAENERXNPSMNLMPGGYEQTMQPPQTQSQP

SEQ ID NO: 9306 - protein, 152 aa, Zea mays
MSLVRRSNVFDPFSMDLWDPFDTMFRSIVPSATSTNSETAAFASARIDWKETPEAHVFKADLPGVKKEEVKVEVEDGNVLVISGQRSREKEDKDDKWHRVERSSGQFIRRFRLPDDAKVDQVKAGLENGVLTVTVPKAEEKKPEVKAIEISG

SEQ ID NO: 9307 - protein, 69 aa, Arabidopsis thaliana
NLEGRLERSITRIRSKKNELLFSEIDYMQKREVDLHNDNQILRAKIAENERNNPSISLMPGGSNYEQLM

SEQ ID NO: 9308 - protein, 544 aa, Desulfitobacterium hafniense DCB-2
MAKQIVFNEEARRALERGVNALAESVRVTLGPKGRNVVLDKKFGAPLITNDGVTIAREIELEDPFENMGAQLVKEVATKTNDVAGDGTTTATVLAQAIIREGLKNVAAGANPMGIKRGIEKAVESVVEDIKTNAKPIESKESIAQVASISAGDDNIGVLISDAMEKVGKDGVITVEEAKGMTTELKVVEGMQFDRGYLSAYMITDTDKMEAILNDPYILITDKKIGAIADILPVLEKVVQAGRQLLIIAEDIEGEALATLILNKLRGTFTCVAVKAPGFGDRRKAMLEDIAILTGGTVITEDLGLKLENTTIDMLGRARQIRVTKEETTIVEGSGSQDDIKSRVEAIKKQIDETTSDFDREKLQERLAKLAGGVAVIQVGAATEVEMKEKKLRIEDALAATRAAVEEGIVAGGGCALVDAAKALDSLKLTGDEKTGVAIVCRALEEPLRQIANNAGFEGSIVVEKVRNGGRGVGFNALTEAYEDMIAAGIVDPAKVTRTALQNAASIAAMLLTTECLVSDIPSKDNGAAAMAGMGGMGGMGGMM

SEQ ID NO: 9309 - protein, 529 aa, Bdellovibrio bacteriovorus HD100
MTHSVYEALLNSNAVIEFDNQGYILWANPNFLNLMEYELDEIEGRHHSIFLPEFHQHELEYQEMWNQLAEGHAQAGEFKRLTKKNREVWIQGSYTPVRNLQGEISKIVKMAVDITEKKSLADNLEKKNKELLGAATKAKAATDAKTVFLANMSHEIRTPLNSIIGITDTLAETPLDNQQASFVEILQRANHQLMTIINDILDLSKVEAGEMELRPLPFNLQRLLDELEAVLGFRAKEKGLKLSLAIDPDVEEYFVGDADRLRQVLMNLLNNSLKFTNNGEISLQVSVNRTVHKGNLLFCVTDTGIGISKQKFKDIFQPFTQADTTTTRKYGGTGLGLSITKNIVQMMNGHIWFESQPGQGTSFFFTISVPSTTERKTTMHNPWQGRYQLTDVNHNISSSRRRILVVDDVEDNRHLFGIYLQKTAHAVSYASGGLEAVEMVAKEHYDIIFMDVQMPGMDGYEATRRIRDMEIQMNRTPAKIFACTANAFQEDVRKSLSAGCDLHLSKPVRKDTMLKAISSCFNDAQEAIY

SEQ ID NO: 9310 - protein, 374 aa, Solanum melongena
LQEFDPDQMGLAENQLCFDLIQEWIVNNPKASICTYEGVQDFQDIAIFQDYHGLPEFRKAVARFMEKVRGDRVTFDPERIVMSGGATGAHESLAFCLADPGDAFLVPTPYYPGFDRDLRWRTGVQLFPVVCESSNNFKVTKEALEEAYKKAQESNIKVKGLLINNPSNPLGTILDKETLKDILRFINDKNIHLVCDEIYAATALCQPSFISISEVMNEVVGCNDDLVHIVYSLSKDLGFPGFRVGIIYSYNDVVVNIARKMSSFGLVSTQTQRLIASMLSDTIFVENFIAKSAMKLSQRHDLFTKGLGQVGITTLKSNAGLFIWMDLRRFLENSTFDDELKLWHIIINKVKLNVSPGCSFHCSEPGWFRVCFAA

SEQ ID NO: 9311 - protein, 610 aa, Pseudomonas chlororaphis
MCGLTGWVDYTRRLEGEDPAIRAMTNTLALRGPDAEGIWKHRHALLGHRRLAVIDLSGGTQPMVYRFADGQEVSLVYTGEVYNHDALRDQLRQAGHVFQTRSDTEVVLHAYLEWGERCCDHLTGMFAFALFDGRDGHLLLVRDRLGIKPLFYARHREGLLFGSETKAILAHPEFTTGLEVTGLVDVLTLSKGTAQTPFRNLMELLPGHFLSWRPNGQMKIQSYWKVRRQEHQHDLQTTVQQTRELVTHALGSQLHADVPVCSLLSGGLDSTTLTAIAQRIVKAKTGGNINSFSVDFTGQAEQFKSDDLRPDQDQPFALLAAEFIGSRHQTVLIDNEELVSYLAREEVFRARELPFTFGDMDTSLNLLFREIRKHSTVAISGEGADEVFGGYGWFRDPKVIASASFPWSSRVKLPAGFINADFNRQCDLAQYQQASYDDALLQVEHLAQDSPHERRMRELCHMHLKRWMVMLLDRKDRLSMCNSLEVRVPFTDHELVEYIYNVPWSIKSKDGEEKWLLKQACADFVPEAVLKRRKSPYPTSADLGYERFLRQSARQLLQDTGNPVFGIVSHAYMAEELRQPEGYFNTQISRHSLETALALDAWLRLHKISL

SEQ ID NO: 9312 - protein, 234 aa, Solanum tuberosum
  misc_feature (30)..(30): Xaa can be any naturally occurring amino acid
MRVIRSTAILILFLLSVFGLSEQGKAGGFXSEEMATLGGVHDSHGSSQNSDEIHSLAKLAVDEHNKKENAMIELARVVKAQEQTVAGKLHHLTLEVMDAGKKKLYEAKVWVKPWLNFKELQEFKHVEDVPTFTSSDLGVKQVEQTSGLKSVPVHDPVVEEAAEHAIKTIQQRSNSLLPYELQEIVHANAEMADDHTKLHLVIKTSRGGKEEKFKVQVQHNNEGAFHLNHMEPDN

SEQ ID NO: 9313 - protein, 492 aa, Capsicum annuum
MDLSKYRPSSAYDSPFLTTNAGGPVYNNVSSLTVGPRGPVLLEDYHLIEKLATFDRERIPERVVHARGASAKGFFEVTHDISHLTCADFLRAPGVQTPVICRFSTVVHTRGSPESIRDILGFAVKFYTREGNFDLVGNNVPVFFNRDTKSFPDTIRALKPNPKSHIQENWRILDFFSFLPESLHTFAFFYDDVCLPTDYRHMEGFGVHAYQLINKAGKAHYVKFHWKPTCGVKSMTEEEAIRVGGTNHSHATKDLYDSIAAGNYPEWKLFIQIMNPEDVDKFDFDPLDVTKTWPEDILPLMPVGRLVLNRNIDNFFAENEQLAFNPGHIVPGVYYSEDKLLQTRIFAYADTQRHRIGPNYMQLPVNAPKCAHHNNHRDGAMNFMHRDEEVDYLPSRFDPCRPAEQYPIPSCVLTGRREKCVIPKENNFKQAGERYRSWAPDRQDRYINKWVESLSDPRVTHEIRSIWISYLSQADKSCGQKVASRLTVKPTM

SEQ ID NO: 9314 - protein, 245 aa, Gymnosporia polyacantha
ALSIAGAVQSQKLAVRAISQLQSLPGGDIKLLCDTVVESVRNLTGYDRVMVYKFHEDEHGEVVAESKRSDLEPYMGLHYPASDIPQASRFLFKQNRVRMIVDCHASPVRVIQDDGLMQPLCLVGSTLRAPHGCHAQYMENMGSLASLAMAVIINGNEEEAIGGRSPTRLWGLVVCHHTSARCIPFPLRYACEFLMQAFGLQLNMELQLAAQLLEKHVLKTQTLLCDMLLRDSPTGIVTQSPSIMD

SEQ ID NO: 9315 - protein, 532 aa, Schizosaccharomyces pombe
NKLLFNRFASSQSKDSNISEMNSKDSNTVPVYTTNTGCPIFNPMAAARVGKGGPVLLQDSHLIDVFQHFDRERIPERVVHAKGSGAFGEFECTDDITKYTKHTMFSKVGKKTPMVARFSTVGGERGTPDTARDPRGFALKFYTDEGIFDMVGNNTPVFFLRDPAKFPLFIHTQKRNPQNDMKDATMFWDYLSQNAESIHQVMILFSDLGGTPYSYRFMDGFSSHTYKFVNDKGEFYYCKWHFITNQGTKGLTNEEAAALDGSNPDHARQDLFEAIERGDYPSWTLYVQVMTPQEAEKYRYNIFDLTKVWPHKDVPMQRVGRFTLNQNPTNFFADIEQAGFSPSHMVPGIEVSADPVLQVRTFSYPDTHRHRLGANFEQIPVNSPKCPVFNYSRDGPMNVNGNQGNWPNYPSSIRPLAKVQYEPDEGHEKWVGQVTYHMDEITDVDFEQPRAFWQNVLGKKPGQQDNFVKNVAGHLSGAISPVRERQYGVFTRVDSELGRRIREATEAEVKKMEEKAPKPINKGEPHMFQGSS

SEQ ID NO: 9316 - protein, 447 aa, Paenibacillus polymyxa
TIFQFPQDFMWGTATAAYQIEGAYQEDGRGLSIWDTFAHTPGKVFNGDNGNVACDSYHRYEEDIRLMKELGIRTYRFSVSWPRIFPNGDGEVNQKGLDYYHRVVDLLNDNGIEPFCTLYHWDLPQALQDAGGWGNRRTIQAFVQFAETMFREFHGKIQHWLTFNEPWCIAFLSNMLGVHAPGLTNLQTAIDVGHHLLVAHGLSVRRFRELGTSGQIGIAPNVSWAVPYSTSEEDKAACARTISLHSDWFLQPIYQGSYPQFLVDWFAEQGATVPIQDGDMDIIGEPIDMIGINYYSMSVNRFNPEAGFLQSEEINMGLPVTDIGWPVESRGLYEVLHYLQKYGNIDIYITENGACINDEVVNGKVQDDRRISYMQQHLVQVHRTIHDGLHVKGYMAWSLLDNFEWAEGYNMRFGMIHVDFRTQVRTPKESYYWYRNVVSNNWLETRR

SEQ ID NO: 9317 - protein, 245 aa, Gymnosporia polyacantha
ALSIAGAVQSQKLAVRAISQLQSLPGGDIKLPCDTVVESVRNLTGYDRVMVYKFHEDEHGEVVAESKRSDLEPYIGLHYPASDIPQASRFLFKQNRVRMIVDCHASPVRVIQDDGLMQPLCLVGSTLRAPHGCHAQYMENMGSLASLAMAVIINGNEEEAIGGRSPTRLWGLVVCHHTSARCIPFPLRYACEFLMQAFGLQLNMELQLAAQLLEKHVLKTQTLLCDMLLRDSPTGIVTQSPSIMD

SEQ ID NO: 9318 - protein, 358 aa, Hippocratea volubilis
QSQKLAVRAISQLQSLPGGDIKLLCDTAVESVRDLTGYDRVMVYKFHEDEHGEVVAESKRPDLEPYIGLHYPATDIPQTSRFLFKQNRVRIIVDCHASPVNVIQDDGLMQPLCLVGSTLRAPHGCHAQYMENMGSIASLAMAVVINGNDEDGIGGRNPTRLWGLVVCHHTSARCIPFPLRYACEFLMQAFGLQLNMELQLAAQLLEKHVLKTQTLLCDMLLRESPTGIVTQSPSTMDLVKCDGAALYYQANYYPLGVTPTEAQIKDIVEWLLVFHGDSTGLSTDSLADAGYPGATLLGDAVCGMAVAYITNRDFLFWFRSHTAKEIKWGGAKRHPEDKDDGLRMHPRSSFKAFLEVVK

SEQ ID NO: 9319 - protein, 236 aa, Arabidopsis thaliana
  misc_feature (160)..(160): Xaa can be any naturally occurring amino acid
  misc_feature (192)..(192): Xaa can be any naturally occurring amino acid
  misc_feature (199)..(199): Xaa can be any naturally occurring amino acid
  misc_feature (206)..(206): Xaa can be any naturally occurring amino acid
  misc_feature (213)..(213): Xaa can be any naturally occurring amino acid
  misc_feature (219)..(219): Xaa can be any naturally occurring amino acid
MSSYSIASAISRISPLIRFVKPYSTGFSFITCACNSTRRPKRFDQLCVFSMASEARESPANNPGLSTNRDEATKGYIMQQTMFRIKDPKASLDFYSRVLGMSLLKRLDFSEMKFSLYFLGYEDTTTAPTDPTERTVWTFGQPATIELTHNWGTESDPEFXKGYHNGNSEPRGFGHIGVTVDDVHKACERFEXLRVEFAXEPNDGKXEDIAFIXDPDGYXNQDFDLKTIGTTTVNAA

SEQ ID NO: 9320 - protein, 374 aa, Hippocratea volubilis
ALSIAGAVQSQKLAVRAISQLQSLPGGDIKLLCDTAVESVRDLTGYDRVMVYKFHEDEHGEVVAESKRPDLEPYIGLHYPATDIPQASRFLFKQNRVRIIVDCHASPVNVIQDDGLMQPLCLVGSTLRAPHGCHAQYMENMGSIASLAMAVVINGNDEDGIGGRNPTRLWGLVVCHHTSARCIPFPLRYACEFLMQAFGLQLNMELQLAAQLLEKHVLKTQTLLCDMLLRESPTGIVTQSPSTMDLVKCDGAALYYQANYYPLGVTPTEAQIKDIVEWLLVFHGDSTGLSTDSLADAGYPGATLLGDAVCGMAVAYITNRDFLFWFRSHTAEEIKWGGAKHHPEDKDDGLRMHPRSSFKAFLEVVKSRSLPWEN

SEQ ID NO: 9321 - protein, 154 aa, Zea mays
MSLVRRSSVFDPFSVDLFDPFDSMFRSIVPPSLSSSAASETAAFASARIDWKETPEAHVFKADLPGVKKEEVKVEVEDGNVLLISGQRSREKEDKGDKWHRVERSSGQFVRRFRLPENAKTEEVRAALENGVLTVTVPKAEVKKPEVKSIQISG

SEQ ID NO: 9322 - protein, 374 aa, Hippocratea volubilis
ALSIAGAVQSQKLAVRAISQLQSLPGGDIKLLCDTAVESVRDLTGCDRVMVYKFHEDEHGEVVAESKRPDLEPYIGLHYPATDIPQASRFLFKQNRVRIIVDCHASPVNVIQDDGLMQPLCLVGSTLRAPHGCHAQYMENMGSIASLAMAVVINGNDEDGIGGRNPTRLWGLVVCHHTSARCIPFPLRYACEFLMQAFGLQLNMELQLAAQLLEKHVLKTQTLLCDMLLRESPTGIVTQSPSTMDLVKCDGAALYYQANYYPLGVTPTEAQIKDIVEWLLVFHGDSTGLSTDSLADAGYPGATLLGNAVCGMAVAYITNRDFLFWFRSHTAKEIKWGGAKHHPEDKDDGLRMHPRSSFKAFLEVVKSRSLPWEN

SEQ ID NO: 9323 - protein, 316 aa, Thermobifida fusca YX
MSELSANSTQRRAPEPEILDEKRSRTERYTIFTFVFVPLLALAAAVPFAWGWGLTWLDVAIGAVFYLIGGLGITVGYHRLFTHGSYRAARPLKIALAIAGSLAIEGGVIKWVADHRRHHKYSDHEGDPHSPWRFGDDWRSVAKGMFYAHMGWLFLDEQKTSPKRFAPDLLKDKDLVRIDRYFWVFVLISLLTPPLIGGLVTMSWWGACTAFFWGSLVRIALLHHVTWSVNSICHTIGEENFTVRDRSRNVWWLAIPSFGESWHNLHHAEPTCARHGVLKGQIDISARVIWIFEKLGWATKVRWPDPERLAAKRVAA

SEQ ID NO: 9324 - protein, 355 aa, Shewanella oneidensis MR-1
MTIENTVNSVENLFDTYKLNDTITLKNRILMAPLTRCMADANLVPTDDMVAYYARRAEAGLIISEATIIRPDAQGYPNTPGIFTQAQIAGWRKVTDAVHANGGKIFVQLWHTGRVAHPHFFGGGDVLAPSAQKIEGSVPRMRELTYVTPKAVTVEDIQGLVRDYAKAAENAIEAGFDGVEIHGANGYLIDQFLHHDSNRRTDEYGGTPVNMSRFALEVVDAIIARIGHDRTGLRISPGAYFNMASDSRDRVVFDYLLPELEKRDLAFVHIGIFDDSIEFDYLGGTASSYVRAHYGKTLVGVGSYSAETASKAIAEDKFDLIAIGRPFIANPDYVAKVRNSEELVAYSDEMLASLI

SEQ ID NO: 9325 - protein, 473 aa, Salmonella enterica subsp. enterica serovar Paratyphi A str.
MPTHLVWFRRDLRLQDNLALAAACRDASARVLALYISTPAQWQAHDMAPRQAAFISAQLNALQTALAEKGIPLLFHEVADFNASIETVKNVCRQHDVSHLFYNYQYEFNERQRDAAVEKTLPSVICEGFDDSVILAPGAVMTGNHEMYKVFTPFKNAWLKRLKEDIPPCVPAPKIRVSGALSIPLTPVSLNYPQQAFDAALFPVEENAVIAQLRHFCSQGADEYASRRDFPAVDGTSRLSASLATGGLSPRQCLHRLLAEQPQALDGGPGSVWLNELIWREFYRHLMTWYPALCKHQPFIRWTKRVAWQENPHYFQAWQKGETGYPIVDAAMRQLNATGWMHNRLRMITASFLVKDLLIDWWLGERYFMSQLIDGDLAANNGGWQWAASTGTDAAPYFRIFNPTTQGERFDRDGEFIRQWLPALRDIPGKAIHEPWRWAEKAGVVLDYPRPIVEHKQARIATLSAYEAARKGA

SEQ ID NO: 9326 - protein, 533 aa, Neorickettsia helminthoeca
MPNEVISGEQLQKVIREAADLVVSSAGVTLGPEGRPVIMSKSYGGPEVTKDGYKVINALKPEDEKVAKIVELLNQATSQANEKAGDGTTTATMLVGNMIKNAHKHIAAQRSRMKLKAGMKRARDAVVKHIQSIAKKIDSEEEIAQVASISANGNSEIGNKIAEAMNKVGKEGVITVEEGKGLEEFSVSVVKGMVFDRGYVSPYFITNSEKMIVEFDNPYILIANKKLSSIQPMVSLLETIVRSNRAVVIIAEDVEGEALTSLVLSKMRGSLKACAVKAPGFGDRRAEMLEDIRILTGARSLVSDDIGVTVESLTVEDLGTAKSIIISKDSTTIVDGNGSKDAISARVNQIKTQIEKTTSDYDKEKLQERLAKLAGGVAVLKVGGATEVEVKERKDRVEDALHATRAAVEEGIVPGGGATLLNAIKVLEELSSDDDDEQAGINIVKAALKAPISQIVENAGEDASVIVHNLLESKDINRIFDARKLQYVDAFKAGIIDPAKVVRVALESAVSVASVLVTTEALIVDLPTKDNAG

SEQ ID NO: 9327 - protein, 557 aa, Oryza sativa (japonica cultivar-group)
MDFALRLRDAANHHLSRYEPLVLLAAPLLALLAARTLHAAAAAVADRGLRTVLLALAMTAIKLLPGVSAYINAEKRKVVDQLQSGGTSTKSTLRTELPTVGLSNQVINDLETLKARDVNWQGKCSGTVYIAGSESEGHFALINKAYSMFSHTNPLHQDVFKSVAQLEAEVVAMTAALLGIKEKSSGGQICGNMTSGGTESILLAVKTSRDYMRTKKGITKPEMIIAESAHSAYDKAAQYFNIKVRRVPVNKEFLADVKGFKRCINGNTIMMVGSAPGFPHGLIDPIEELGELASRYDICLHVDLCLGGFVLPFARKLGYPIPPFDFCVKGVTSISTDVHKYGLAPKGTSIVLYKNHEIRKISWLSLHNYYSLTDMIMLQNCTKMFKQVTEWTGGLYVSPTIAGSRPGGLIAGAWAAMTSLGLNGYMENTGHIMEVSKKIQRGIEDIPGLFVIGKPDMTVVAFGSDSVDIFEVNDIMSSKGWHLNALQRPNSLHICVTLQHTVIYEEFLKDLKDSVDTVKANPGPISGGRAPIYGAAGKMPDRGMVRELLVEFMDASC

SEQ ID NO: 9328 - protein, 357 aa, Triticum aestivum
  misc_feature (175)..(175): Xaa can be any naturally occurring amino acid
  misc_feature (222)..(222): Xaa can be any naturally occurring amino acid
  misc_feature (254)..(254): Xaa can be any naturally occurring amino acid
  misc_feature (279)..(279): Xaa can be any naturally occurring amino acid
  misc_feature (343)..(343): Xaa can be any naturally occurring amino acid
MMGRKALDYEELNENVKKVQYAVRGELYLRASELQKEGKRIIFTNVGNPHALGQKPLTFPRQVVALCQAPFLLDDPNVGLIFPADAIARAKHYLSLAPGGLGAYSDSRGIPGVRQEVAEFIQRRDGYPSDPELIYLTDGASKGVMQMLNAIIRNERDGILVPVPQYPLYSAAISXLGGSLVPYYLEEEANWGLDLVSTRQSVAEARSKGITVRAMVIINPGXNPTGHCLKSEANIRELLNFCYQENLVLLADEXVYQQNGYQDERPFISARKVMFDMGXPPVSREGQLIPFHTVSKGYWGECGQRGGYFEMTNIPPKTVDEIYKVASIPLSPNVPGRIFMGLXEPPKPGRHSYLNIC

SEQ ID NO: 9329 - protein, 374 aa, Zea mays
AAVLTGAVRAIKVLDRNHVLRHRMVEQIKREISTMKLIKHPNVVQLHEVMASKTKIYMVLEFVDGGELFDKIVNSGRLGEDEARIYFHQLINAVDYCHSRGVYHRDLKPENLLLDSNGALKVSDFGLSAFAPQTNEDGLLHTTCGTPNYVAPEVLADKGYDGMAADVWSCGIILFVLMAGYLPFDDANLMRLYKLICQAYFSCPPWFSSGAKKFIKRILDPNPDTRITIAEILEDEWFKKDYKPPRFEQGEDVSLDDIDAAFNDSEDRLVAEKREKPESMNAFALISRSQGFNLGNLFEKEMMMKLKGDKSGRKGHLSVATEVFEVAPSLHMVELRKTGGDTLEFHSFYKNFSSELKDIVWKAESDANNKQTNK

SEQ ID NO: 9330 - protein, 395 aa, Zea mays
EFPGEKPLLSHLRFFPWVVNEVYFKVWRQGRTGYPLVDAGMRELWATGWVHDRIRVVVSSFFVKVLQLPWRWGMKYFWDTLLDADLESDALGWQYISGSLPDGRELDRIDNPQFEGYKFDPHGEYVRRWLPELARLPTEWIHHPWDAPESVLQAAGVELGSNYPRPIVELDAANSRLQDALSEMWELEAASRAAMENGMEEGLGDSTDEPPIDFPQELRMEVDRQPVQPAIHAPGVTGRRREDQMVPSMTSSFIRAETELTADFGHTSEDSRPEVPSNIHHLQARPEREETVDGGTGNAVRVHGNHHQQNLQNNMHRVLGIAPSISEASSSWTGRDGGVVPVWSPPAASGHSDSYAADEADISSRGYLDRHPQSHTMMNWSQLSQSLTTGWEVDN

SEQ ID NO: 9331 - protein, 374 aa, Geobacter metallireducens GS-15
MRKVFDETKIHHLTLRNRLVRSATWEGMCRAGGHPTEKLAAYYGTLARGGVGLIISGYAFVRPDGKQLPGQLGIHEDSFAPEARLLTEAVHREGGKICLQLVHCGGQTTARAAGAQPVAPTAVQIDQYPELPRELPEAEIADLVAAFAAGAVRAREWGFDAVQLHAAHGYLINQFLSPLTNRRTDRYGGSLENRCRFLLEISHAVRAAVGKDFPVMVKLNGSDNLNGGLDLEEAVLVARMLDEEGIDAIEVSGGTPASGGQTPVRQGIETREQEAYNLPLAYRIKQVVSCPVMVVGGFRTFELVEGVIRREEADFVSLSRPLIREPNLPRRWEEGDESRARCISCNGCFKPGMKEGGIYCVVDKVERESRAFSL

SEQ ID NO: 9332 - protein, 674 aa, Synechococcus sp. CC9605
MCGIGGVFNADRQQTVDRQLLVNMAAIQAHRGPDGFGVEVLDQAGVGFCHARLSIIDLNESRARQPFLTDDGEVLMAHNGEFYDFQRIRADLTAQGVRFSSKSDSEILLRLYQRQGLEATLPLLRGEFAFALFDRSEDCLYLVRDRFGIKPQYWAITPEGLVFGSELKVLFAHPAVERRFTSEGLFHQLMQTMVPGTTAFAGVHQVKPGHVLKVQRVNGHLEVSESTYWDVDFPRKDERDPKRTEADYIAAVRAALLEAVELRMVADVPVGCYLSGGIDSCSILGLASAVSQAPVKAFTIGFDDARYDESPIAREMAEATGAEQDLMRLSGQELYGHMERTIWHAERTIYNTLAVAKFLMSRHVNDVDYKVVMTGEGSDELFGGYPAFRRDMFLHGLDDLPQEERASWESLLQQSNALVKGAMLAENQVDDPDLDAVVGFTPSCLQPWLACAPLVPELLAESHAAALEGYSPGKAIAEQLDADQLDGRHALDKAQYVWIKTMLEGQILTWGGDRVDMANSMEARPAFLDHHLAAVAVQVPPELRIKGKTEKYVLREAMAGLLPEVLYRREKFAFMAPPAHTEPEKWGQMKQLADDYLSDEAIDSAGLLSKAGVLALFERHEDPATTDAERVQMDAVINHLLGVQMLHRMFVAEDVPALARREADRLGWRVLMPV

SEQ ID NO: 9333 - protein, 552 aa, Magnetospirillum magnetotacticum MS-1
MAAKEVKFSTDARTRMLRGVDILADAVKVTLGPKGRNVVIEKSFGAPRITKDGVTVAKEIELADKFENMGAQMVREVASKTADLAGDGTTTATVLAQAIVREGVKAVAAGLNPMDLKRGVDLAVAAVVADVKSRSRKVATNAEIAQVGTISANGEKEIGDMIAKAMEKVGNEGVITVEEAKGLDTELDVVEGMQFDRGYTSPYFVTNAEKMTVELDNPYILLHEKKLSGLQPLLPVLEQVVQSGRPLVIIAEDIEGEALATLVVNKLRGGLKVAAVKAPGFGDRRKAMLEDIAILTGGQVISEDLGIKLESVNLEMLGTSKRITITKEDTTIVDGSGDKSAIDARCKQIRAQVEETTSDYDREKLQERLAKLAGGVAVIKVGGASEIEVKERKDRVDDALHATRAAVEEGIVPGGGVALLHAVKALEGLKSGNADQEVGISIVRRALQAPVRQIAENAGHDGAVVAGKIGESKDLAFGFDAQTGVYTDMIKAGIIDPTKVVRTALQDAASVAGLLITTEAMIAERPKKDAGGMPGGDMGGMGGMGGMGGMDF

SEQ ID NO: 9334 - protein, 180 aa, Triticum aestivum
  misc_feature (99)..(99): Xaa can be any naturally occurring amino acid
  misc_feature (114)..(114): Xaa can be any naturally occurring amino acid
  misc_feature (124)..(124): Xaa can be any naturally occurring amino acid
  misc_feature (132)..(132): Xaa can be any naturally occurring amino acid
  misc_feature (134)..(134): Xaa can be any naturally occurring amino acid
  misc_feature (139)..(139): Xaa can be any naturally occurring amino acid
  misc_feature (141)..(141): Xaa can be any naturally occurring amino acid
  misc_feature (146)..(146): Xaa can be any naturally occurring amino acid
  misc_feature (148)..(148): Xaa can be any naturally occurring amino acid
  misc_feature (157)..(158): Xaa can be any naturally occurring amino acid
  misc_feature (161)..(161): Xaa can be any naturally occurring amino acid
MEGRMFGLETPLMTALQHLLDVPDSESGGAGNAGGERQGPTRAYVRDARAMAATPADVKELPGAYAFVVDMPGLGSGDIKVQVEDERALVISGERRREXKEDARYLRMERRMGXKLMPKFVLPXENAHMEKXSXAVCRXRXAQPSXSXKLPPAPKPXXAPXTIQSRSPLKNESICPVQSK

SEQ ID NO: 9335 - protein, 731 aa, Corynebacterium glutamicum ATCC 13032
MTVDPASHITIPEADLARLRHCNHHDPHGFYGWHETEAGSVIRTRQVGATQVNLLIDDTSHVMTPIGDDIFAIDLGHRERADYRLEVTWPDQEPQVKADPYYFLPTVGEMDIYLFSEGRHERLWEILGANIKTYQTALGTVRGTAFTVWAPNAIGCAVVGGFNGWNASQHPMRSMGGSGLWELFIPGIEEGEVYKFAVQTREGQRRDKADPMARRAELAPATGSIVASSEYQWQDSEWLRERSQTDLASKPMSVYEVHLGSWRWGKNYEDLATELVDYVADLGYTHVEFLPVAEHPFGGSWGYQVTGYYAPTSRWGTPDQFRALVDAFHARGIGVIMDWVPAHFPKDDWALARFDGEALYEHPDWRRGEQKDWGTLVFDFGRNEVRNFLVANALYWIEEFHIDGLRVDAVASMLYLDYSREHGEWEPNIYGGRENLEAVQFLQEMNATVLRLHPGALTIAEESTSWPGVTAPTWDGGLGFSLKWNMGWMHDTLEYFSKNPVHRAFHHSELTFSLVYAFSERFVLPISHDEVVHGKGSLWDRMPGDTWNKAAGLRTFLAYMWSHPGKKLLFMGQEFGQREEWAEGQGLPWDIVDGWQGEYHEAIRTLTRSLNGVYSDSPALHTQDFTGEGFTWNKGDDATNNILAFTRFGSDGSQMLCVFNLSGTSQPEYQLGVAAGGEWKLVLNTDDAEFLGAENDIATSVQAAATPRDNFAYSLSLHVPAMSAQFYSLQK

SEQ ID NO: 9336 - protein, 374 aa, Loeseneriella africana
ALSIAGAVQSQKLAVRAISQLQSLPGGDIKLLCDTAVENVRNLTGYDRVMVYKFHEDEHGEVVAESRRPDLEPYIGLHYPATDIPQASRFLFKQNRVRIIVDCHASPVSVIQDDGLMQPLCLVGSTLRAPHGCHAQYMENMGSIASLAMAVIINGNDEDGMGGRNPTRLWGLVVCHHTSARCIPFPLRYACEFLMQAFGLQLNMELQLAAQLLDKHVLKTQTLLCDMLLRESPTGIVTQSPSIMDLVKCDGAALYYQANYYPLGVTPTEAQIKDIVEWLLAFHGDSTGLSTDSLADAGYPGATSLGDAVCGMAVAYITNKDFLFWFRSHTAKEIKWGGAKHHPEDKDDGQRMHPRSSFKAFLEVVKSRSLPWEN

SEQ ID NO: 9337 - protein, 363 aa, Loeseneriella africana
QSQKLAVRAISQLQSLPGGDIKLLCDTAVENVRNLTGYDRVMVYKFHEDEHGEVVAESRRPDLEPYIGLHYPATDIPQASRFLFKQNRVRIIVDCHASPVIVIQDDGLMQPLCLVGSTLRAPHGCHAQYMENMGSIASLAMAVIINGNDEDGMGGRNPTRLWGLVVCHHTSARCIPFPLRYACEFLMQAFGLQLNMELQLAAQLLEKHVLKTQTLLCDMLLRESPTGIVTQSPSIMDLVKCDGAALYYQANYYPLGVTPTEAQIKDIVEWLLAFHGDSTGLSTDSLADAGYPGATSLGDAVCGMAVAYITNKDFLFWFRSHTAKEIKWGGAKHHPEDKDDGQRMHPRSSFKAFLEVVKSRSLP

SEQ ID NO: 9338 - protein, 254 aa, Brassica rapa subsp. rapa
MGRGRVEMKRIENKINRQVTFSKRRAGLLKKAHEISILCDAEVSLIVFSHKGKLFEYSSESCMEKVLERYERYSYAEKQLKAPDSHVNAQTNWSMEYSRLKAKIELLERNQRHYLGEDLESISIKELQNLEQQLDTSLKHIRSRKNQLMHESLNHLQRKEKEILEENSMLTKQIKERESILRTHQNQSEQQNRSHHVAPQPQPQLNPYMISHQASPFLNMGGMYQGEDPTAVRRNRLDLTLEPIYNCNLGYFAA

SEQ ID NO: 9339 - protein, 365 aa, Loeseneriella africana
AVQSQKLAVRAISQLQSLPGGDIKLLCDTAVENVRNLTGYDRVMVYKFHEDEHGEVVAESRRPDLEPYIGLHYPATDIPQASRFLFKQNRVRIIVDCHASPVSVIQDDGLMQPLCLVGSTLRAPHGCHAQYMENMGSIASLAMAVIINGNDEDGMGGRNPTRLWGLVVCHHTSARCIPFPLRYACEFLMQAFGLQLNMELQLAAQLLEKHVLKTQTLLCGMLLRESPTGIVTQSPSIMDLVKCDGAALYYQANYYPLGVTPTEAQIKDIVEWLLAFHGDSTGLSTDSLADAGYPGATSLGDAVCGMAVAYITNKDFLFWFRSHTAKEIKWGGAKHHPEDKDDGQRMHPRSSFKAFLEVVKSRSLP

SEQ ID NO: 9340 - protein, 612 aa, Bradyrhizobium japonicum USDA 110
MCGIAGIVNLRGSAVEPDDISRLTGLIAHRGPFGQGTWFSADRSLAFGHRRLAIIDPGEGGYQPMRSADGRHVIVFNGEIYNFLELRRELEAQGVVFRSQSDTEVILAAWQAWREDMLPRFNGMWALAIFDTATGELFLARDRFGIKPLLYAVSPERFIFASEQRALVRSGLIDASVDVEVARRLLLDAFGIEGSERTLFRQVRRLQGGHCMWLRQGKVSVRRWWRTVDHLPPVPGTEAEQVARFRELFQDAVALRMRSDVPIGTCLSGGFDSSAVICTMAAHEKAGMGPRDSTAWRHAFVATFPGALNDERPMAEEAAAWAEVAPTFLEIGQADALIDLDQILDDLDDVYIALPSAIWLIYRQLRRQDVTVSLDGHGADELMGGYLQQGQALAFRIRNAAEDFASRSALARRSVDVLRMLALKRRGVYFLRGGLRDLPASLPLVAEDDVLPREWGGLNRRLYRMFHSTVLPTILRNFDRLSMAHGVEVRMPFMDWRLVTYTMALPESSKSSEGYTKAVARRAMANLMPESIRTARRKVGFNSPMPEWLNGPLAGWTADLLDRKVPAFAELVDEAALRTTVSRLTASKSWDWEAVGRIWPYLNMKWMLARYA

SEQ ID NO: 9341 - protein, 501 aa, Oryza sativa (japonica cultivar-group)
MDGRSILMGRYEVGKQLGQGTFAKVYYARNLTTGQAVAIKMINKDKVMKVGLMEQIKREISIMRLVKHPNVLQLFEVMASKSKIYFVLEYAKGGELFNKIAKEGKLSEDSARRYFHQLINAVDYCHSRGVYHRDLKPENLLLDENENLKVSDFGLSALAESKRQDGLLHTTCGTPAYVAPEVLSRKGYDGAKADVWSCGVILFVLVAGYLPFHDPNLIEMYRKICRADFRCPRYFSAELKDLIHKILDSDPSTRISIPRIKRSTWYRKPVEINAKNSEAATTNSISSGVATTSGSAECSTSEENQGSLSLPNLNAFDIISLSTGFNLSGFFEDTHGHQEERFTTRQPVTTVLGKLKELAKRLKLKVKKKDNGVLRLAAPKEGKKGFLELDAEIFEVTPSFLLVELKKTNGDTMEYRKLVKEDIRPALKDIVWVWQGDEHLNSQSILQGEQQQSPLPPELPQDQLQPSLPQQEKQDMPEPPLLPQVPQEEVQTSIPAEQTKN

SEQ ID NO: 9342 - protein, 336 aa, Xanthomonas axonopodis pv. citri str. 306
MSRPSLTRFLIEEQHAGRIDAELRQLITIVSRACKRISIAVSKGALGGVLGDAGTGNVQGEAQKKLDVLSNDILLEANAWGGHLAACASEEMDHSQPVPDQYPSGDFLLLFDPLDGSSNIDVNVSVGTIFSVLRAPKGTEKPGDEHFLQPGTQQVAAGYCIYGPSTMLVLTLGHGTHAFTLEREEGSFLLTQANMRVPEDTAEYAINMSNQRHWEPAMQAYVGDLLAGKDGARGKDFNMRWIASMVADVHRILTRGGIFIYPWDKKDPSKPGKLRLMYEANPMSMLVEQAGGAATTGRERILDIQPTQLHQRVPVFLGSKNEVAEATRYHLDADKA

SEQ ID NO: 9343 - protein, 280 aa, Listeria innocua Clip11262
MTLSFSDTYRLNNGIEMPRHGFGVYKLTDEQRMRTALETAVDVGYRLFDTASFYHNEKELGDFFASSGLKRDEFFVTTKMWNTEQGYDETLRAFEKSQKKLQLDQVDLYLVHWPKQDTFFETWRAVEKLYDEGLVRAIGVSNFEAHHLDRLRTSANVLPVVDQLETHPHFPNQLLHRYLEELHIVHQAWSPLGRGGVLQEQILIDLAKKHGKSPAQIVLRWHLQNNISIIPKSETPSRIRENADIYDFELTEADMRQVERLNNGERVSHAPDVMYVRSEI

SEQ ID NO: 9344 - protein, 364 aa, Maytenus fournieri
VQSQKLAVRAISQLQSLPGGDVKLLCETVVESVKDLTGYDRVMVYKFHDDEHGEVVAERKRPDLEPYIGLHYPATDIPQASRFLFKQNRVRMIVDCHALPVRVIQDDGLMQPLCLVGSTLRAPHGCHAQYMENMGSIASLAMAVIINGNDEEVIGGRNPTRLWGLVVCHHTSARCIPFALRYACEFLMPAFGLQLNMELQLAAQLLEKHVLKTQTLLCDMLLRDSPTGIVTQSPSIMDLVKCDGAALYYQGSYYPLGVTPTEAQIKDIVEWLLAFHGDSTGLSTDSLADAGYPGAALLGDAVCGMAVAYITNRDFLFWFRSHTAKEIKWGGAKHHPEDKDDGQRMHPRSSFKAFLEVVKSRSMP

SEQ ID NO: 9345 - protein, 363 aa, Maytenus fournieri
QSQKLAVRAISQLQSLPGGDVKLLCETVVESVKDLTGYDRVMVYKFHDDEHGEVVAERKRPDLEPYIGLHYPATDIPQASRFLFKQNRVRMIVDCHALPVRVIQDDGLMQPLCLVGSTLRAPHGCHAQYMENMGSIASLAMAVIINGNDEEVIGGRNPTRLWGLVVCHHTSARCIPFPLRYACEFLMQAFGLQLNMELQLAAQLLEKHVLKTQTLLCDMLLRDSPTGIVTQSPSIMDLVKCDGAALYYQGSYYPLGVTPTEAQIKDIVEWLLAFHGDSTGLSTDSLADAGYPGAALLGDAVCGMAVAYITNRDFLFWFRSHTAKEIKWGGAKHHPEDKDDGQRMHPRSSFKAFLEVVKSRSMP

SEQ ID NO: 9346 - protein, 202 aa, Saccharophagus degradans 2-40
MEVVFMNLQTLNPWNWFKHEEAAKQHAAAPAIHSAENSETSAPQLNSLIQLHQQMDKLFDDVFSSFGFPSLGARFADANLLTNRANSLLGGYRPTVDVSGDKTHYHISLDVPGLSESDISIDVSNDVLTIRGSKEEKAEQNEKHVYRMERRYGSFQRTLSLPSDANTDDITAQLKDGVLNLVIAKKDVPPEDVKRIPINSVH

SEQ ID NO: 9347 - protein, 352 aa, Cytophaga hutchinsonii
MAFIDVVLQRPSYGWMDENGNLVKPAGKQLFAEFCSRINIFKSRKNWIALAGWFWVLCLLPFLFLFLFTYFNWKLLFICIFYSMVVMGTHGTIWYHRYGTHRAFIFRNAFWRFITQNLVVKLIPEEIYIVSHHVHHSKSDQPGDPYNASAGFLYCFLADTNHQPIAKDLDEKNYARAAVLVKHTGIKINSYEQYQKWGSIADPGRTAALWIANWVCWYGIFYLIGGHALACALFSGALIWVIGVRTFNYNGHGKGTESHRDGLDFNRKDLSVNQYRPGLLAGEWHNNHHMYPGSARSGFLPYQIDFAWYYIYVLYKIGAVSSYHDSKKQFYENYYVPYKNASKKESVKDFVD

SEQ ID NO: 9348 - protein, 494 aa, Triticum aestivum
MSYNKTASITAETINPKVKIFDYEPCGEIARHAERLEQEMEKSPGSRPFPEITYCNLGNPQALGQRPITFFREVLSLCDNPALLRRDETRMLFSPCAINRARKIIESMPGRNSGAYTNSQGIRSLREAVASGIAARDGFPSRPEDIFLTDGASSAINLSMQILIRSQEDGVLCPLPEYPLYSASIILHGGTMVPYNLSEDGDWGLEIFEVKRCLEEARIAGLTVRAMVIINPGNPTGQVLSVTNQEEIVEFCRKEGLVMLADEVYQDNVYVEDRKFHSFKKVARSLGYDENDISIVSFHSVSMGFSGECGRRGGYMEICGFGDDVMGEIRKVASVTLCPNIGGQILTSLAMDPPKLGDGCFENFMAEKEDIRLSLAKRAKTLAGAFSSLEGMTCNRVEGAIYAFPRIHLPAAAIKAAKAEGMSPDLFYACRLLDATGIAVVPGSGFHQVSGRNKATGTWHIRCTILPGEDKIKVMIPRLKEFHESFMNEFRDRS

SEQ ID NO: 9349 - protein, 286 aa, Lactobacillus sakei subsp. sakei 23K
MQKLSALTAPMALSNGVTIPGLGYGTYQTPNEETKKAVLEALSVGYRHIDTAAVYGNEQGVGDALKESDIAREDIFVTSKLWNTERGYDATKAAFAKTIATLGVDYLDLYLIHWPANTKQFGAKAAELNAETWRAMEDLYNEGKIRAIGVSNFMPHHLDELMKTAVIKPMVDQIEVHPGWPQAEAVRYNQAHDILVEAWAPLGEASALSNETIAAIATKHGKTAAQVCLRWGIQQGVLPLPKSTHQERMAQNTDIFDFELTDAEMTQISALENLGGQCMVPDEVDF

SEQ ID NO: 9350 - protein, 445 aa, Bradyrhizobium japonicum USDA 110
MRKTLLFPLGALTGACLTLLVASPHGGVWAARAAAGADDAYSQLNLFGEVFERVKASYVEKPDNAKLIEGAITGMVTSLDPHSRYMNDKAWTEMQETTSGEFGGLGIEVTMEEGLVKVVSPIDDTPASKAGIMSGDLISKIDGDAVQGMTLEQAVNKMKGPVDTKTKLTIVRKGADAPLDIAITREIIHVRPVRFHVENGDIGYIRVTSFNEQTTDGLKKAIAAISREIPQEKLAGYVMDLRNNPGGLLDQAVSVSSAFLQRGEVVSTRGRNPEETQRFTAHGGDLTKGKPLVVLVNGGSASASEIVAGALHDHKRATIIGTRSFGKGSVQTIIPLGAGNGALALTTARYYTPSGRSIQAQGIAPDIEILQDVPPELKGRMDTMAESQMRGHLQAADGTEQTGSQSYVPPKEEDDKALHAAYDFLHGVTANAVAAKPAPKAAVPN

SEQ ID NO: 9351 - protein, 726 aa, Xanthomonas campestris pv. campestris str. 8004
MKSPLPWLKRRLSGRADSEHAQNLIRIIITTLFISYLGWRYQHTHGDTLMATWLILVGELLVSLGLMVAILLRPQVSHTRRLIGMLLDYTCTGAIMAIQGEPASPLYAVCMWVTIGNGLRYGSNYLRAATAMGSLCFLGAILISPYWKANPYLSWGLLLGLIAVPLYFDSLLRAMTRAVREARHANQAKSRFLANMSHEFRTPLNGLSGMTEVLATTRLDAEQKECLNTIQASARSLLSLVEEVLDISAIEAGKIRIDRRDFSLREMIGSVNLILQPQARGRRLEYGTQVADDVPDLLKGDTAHLRQVLLNLVGNAVKFTEHGHVLLRVTRVSGSAEDAVRLRFDVEDTGIGVPMDMRPRLFEAFEQADVGLSRRYEGTGLGTTIAKGLVEAMGGSIGFKENQPSGSVFWFELPMAIGEPLKSSTVRVPTGALVDAPEELESSNIIAFSNPFLRHRARVRSMRMLVADDHEANRMVLQRLLEKAGHKVLCVNGAEQVLDAMAEEDYDAVIVDLHMPGMNGLDMLKQLRVMQASGMRYTPVVVLSADVTPEAIRACEQAGARAFLAKPVLAAKLLDTLADLAVSTRQLATPATTVQVATSFEGVLDSSVLDELAALGMGEEFERQFVRQCLDDAQNCVGDIERDGTCSDWEQLRESAHALRGVASNLGLAQVASSGGELMRMADWQLQAEWRLRLSTLREQLKAGKDALDARVQGVKDGECSPRSNE

SEQ ID NO: 9352 - protein, 358 aa, Maytenus undata
SQKLAVRAISQLQSLPGGDIKLLCDTVVESVRDLTGYDRVMVYKFHEDEHGEVMAESKRPDLEPYIGLHYPASDIPQASRFLFKQNRVRMIVDCHASPVLVIQDDRLMQPLCLVGSTLRAPHGCHAQYMENMGSIASLAMAVIINVNDGEGIGGRNPTRLWGLVVCHHTSARCIPFPLRYACEFLMQAFGLQLNMELQLAAQLLEKHVLKTQTLLCDMLLRDSPTGIVTQSPSIMDLVKCDGAALYYQGNYYPLGVTPTEAQIKDIVEWLLAFHGDSTGLSTDSLADAGYPGAALLGDAVCGMAVAYITNRDFLFWFRSHTAKEIKWGGAKHHPEDKDDGQRMHPRSSFKAFLEVVKS

SEQ ID NO: 9353 - protein, 544 aa, Chlamydia muridarum
MVAKNIKYNEEARKKIQKGVKTLAEAVKVTLGPKGRHVVIDKSFGSPQVTKDGVTVAKEVELADKHENMGAQMVKEVASKTADKAGDGTTTATVLAEAIYTEGLRNVTAGANPMDLKRGIDKAVKVVVDQIKKISKPVQHHKEIAQVATISANNDAEIGNLIAEAMEKVGKNGSITVEEAKGFETVLDVVEGMNFNRGYLSSYFATNPETQECVLEDALVLIYDKKISGIKDFLPVLQQVAESGRPLLIIAEDIEGEALATLVVNRIRGGFRVCAVKAPGFGDRRKAMLEDIAILTGGQLISEELGMKLENASLAMLGKAKKVIVSKEDTTIVEGMGEKEALDARCESIKKQIEDSTSDYDKEKLQERLAKLSGGVAVIRVGAATENEMKEKKDRVDDAQHATIAAVEEGILPGGGTALIRCIPTLEAFLPMLTNEDERIGARIVLKALSAPLKQIAANAGKEGAIIFQQVMSRSANEGYDALRDAYTDMIEAGILDPAKVTRSALESAASVAGLLLTTEALIAEIPEEKPAAAPAMPGAGMDY

SEQ ID NO: 9354 - protein, 245 aa, Maytenus undata
ALSIAGAVQSQKLAVRAISQLQSLPGGDIKLLCDTVVESVRDLTGYDRVMVYKFHEDEHGEVMAESKRPDLEPYIGLHYPASDIPQASRFLFKQNRVRMIVYCHASPVLVIQDDRLMQPLCLVGSTLRAPHGCHAQYMENMGSIASLAMAVIINVNDGEGIGGRNPTRLWGLVVCHHTSARCIPFPLRYACEFLMQAFGLQLNMELQLAAQLLEKHVLKTQTLLCDMLLRDSPTGIVTQSPSIMD

SEQ ID NO: 9355 - protein, 217 aa, Cryptomeria japonica
MVRGKVNLQRIQNPVNRRVTFSKRKAGLLKKAGELSVLCEAEICSIIFSPTGKLFEFASHSMNRIIGKYKKNCASIGHHIQLQEHLETLRMELENLRIETTHLEKTCKHMNGEDLDFLNFKELQKLEKKMSLSARKIHLRKDKILVENVGSLKSKEKLLELENAEMDKKIGRSHKACHLNINMMDEVNSKLETEASTRQDCLKLTLISRNFHDDNFC

SEQ ID NO: 9356 - protein, 245 aa, Mortonia greggii
ALSIAGAVQSQKLAVRAISQLQSLPGGDIKLLCDAVVENVRNLTGYDRVMVYKFHEDEHGEVVAESKRPDLEPYIGLHYPATDIPQASRFLFKQNRMRMIVDCHSTPVSVIQDDGLMQPLCLVGSTLRAPHGCHAQYMANMGSIASLAMAVIINGNDEDGIGGRNTTRLWGLVVCHHTSARCIPFPLRYACEFLMQAFGLQLNMELQLASQLLEKHVLKTQTLLCDMLLRDSPTGIVTQSPSIMD

SEQ ID NO: 9357 - protein, 283 aa, Bacteroides fragilis NCTC 9343
MDFKELNNGVKMPIQGFGVFQIPDATECERVVTDALAVGYRLIDTASVYGNERAVGTAIRKSGIPREELFITTKAWISEMGYERTLRALDASLARLGLDYLDLYLIHMPFGDYYGAWRAMEKLYAKGRVRAIGVCNFEPDRLLDLCHNANVIPAVNQIEVHPYTPQTDAIRTMQELGIQAEAWGPLAEGRNGLFTDDILTGIARKYDKSAAQVVLRWHLQRGVVAIPKSVHRQRMQENFNIGDFMLTPEDMAAIASMNTGYNTILDLRAPEEVQRLYGIECPA

SEQ ID NO: 9358 - protein, 245 aa, Mortonia greggii
ALSIAGAVQSQKLAVRAISQLQSLPGGDIKLLCDAVVENVRNLTGYDRVMVYKFHEDEHGEVVAESKRPDLEPYIGLHYPATDIPQASRFLFKQNRVRMIVDCHSTPVSVIQDDGLMQPLCLVGSTLRAPHGCHAQYMANMGSIASLAMAVIINGNDEDGIGGRNTTRLWGLVVCHHTSARCIPFPLRYACEFLMQAFGLQLNMELQLASQLLEKHVLKTQTLLCDMLLRDSPTGIVTQSPSIMD

SEQ ID NO: 9359 - protein, 226 aa, Zea mays
MSSSTASWSRYGALPTSPPAPQLKPEDVAAAGGDAAPSSSSAAATAAEAGVAFFSRARAFAGAAAGRPRAWREVLDPTAFSCPDSCGEARARARRNLAYFRANYALAALALVFLGLVYRPASMLAFLALFVAWLGLYFGRGGGEPLVCLRREVDDRVVLAALSAATVLAVALTRAGLNLLVSLVVAAAVIGAHAAFRVNLYLDESDAFDVAGASFTDTAYGYALPS

SEQ ID NO: 9360 - protein, 830 aa, Hordeum vulgare
RAPHGCHAQYMANMGSIASLVMSVTVNEDDDEDGDTGSDQQPKGRKLWGLVVCHHTSPRFVPFPLRYACEFLLQVFGIQLNKEVELASQAKERHILRTQTLLCDMLLGDAPVGIFTQSPNVMDLVKCDGAALCYQNQIMVLGSAPSEGEIKKIAAWLLECHDGSTGLSTDSLLEAGYPGASALGEVVCGMAAIKISSKGFIFWFRSHTAKEIKWSGAKHEPGDADDNGRRMHPRSSFRAFLEVVKWRSVPWEDVEMDAIHSLQLILRGSLQDEDANDNNVGSIVEAPSDDVRKIQGLLELRVVTNEMVRLIETATAPILAVDIVGSINGWNGKVAEITGLPTTEAIGMLLVDLVEGDSVEVIKQMLNSAMQGTEEQNFEIKLKTFHQQEGNGPVVLMVNACCSRDLSDKVVGVCFVAQDLTGHKMVMDKYTQIQGDYVAIVKNPNELIPPIFMINDLGSCLEWNEAMQKITGIKREDAIDKLLIGEVFTLHDYGCRVKDQATITKLSILMNTVISGQEPEKLAFGFFSTDGKYMESLLTANKRTDAEGKITGALCFLHVPSPELQHALQVQKMSEQAAARSFKELTYIRQELKNPLNGMQFTRKLLEPSDLTEEQRQLFASNVLCQEQLKKILHDNDLEGIEQCYMEMNTVEFNLEEALNTVLMQGMSLSKEKQISLDRDWPVEVSSMYLYGDDLRLQQVLADYLACTLQFTRPAEGPIVLQVIPKKEHIGSGMQIAHLEFRVVHPAPGVPEALIQEMFRHGPGVSREGLGLHISQKLVKTMSGTVQYLREAESSSFIVLVEFPVAQLNSKRSKPSTSKWSKPSTSKSNF

SEQ ID NO: 9361 - protein, 917 aa, Pseudomonas chlororaphis
MLKKLGIKGRVLLLTLLPTSLMALVLGGYFTWMQQSDLQTQLLQRGEMIAEQLAPLVAPALAHQNTALLERIATQSLEQQDVRAVTFLAPDRTPLAHAGPSMLNQAPTGNGSQMLQRTGSDATRYLLPVFGRHRNLAGDLIPDESDRLLGWVELELSHNSMLLRGYRSLFASLMLITAGLICTGLLALRMGRTINNPLSQIKQAVTQLKDGNLETRLPLLGSQELDELASGINRMAGTLQNAQEELQHSIDQATEDVRQNLETIEIQNIELDLARKEALEASRIKSEFLANMSHEIRTPLNGILGFTHLLQKSELTPRQLDYLGTIEKSADSLLGIINEILDFSKIEAGKLVLDSIPFNLRDLLQDTLTILAPAAHAKQLELVSLVYRDTPLSLVGDPLRLKQILTNLVSNAIKFTREGTIVARAMLEEEHEDSVQLRISIQDTGIGLSNQDVRALFQAFSQADNSLSRQPGGTGLGLVISKRLIEQMGGEIGVDSTPGEGSEFWISLRLPKTRDDAEDLPAPPLLGRRVAVLENHELARQALQHQLEDCGLEVTPFNTLEALTNGVTGVHQTEQAIDLAVLGITTNDMPPERLNQHIWDLEHLGCKVLVLCPTTEQTLFHLSVPNPHSQLQAKPACTRKLRRALADLVNPKAVRSEPSEPIASRPPRVLCVDDNPANLLLVQTLLEDMGAKVLAVDSGYAAVKAVQNESFDLVMMDVQMPGMDGRQSTEAIRQWESERNCTPLPVIALTAHAMANEKRALLQSGMDDYLTKPISERQLAQVVLKWTGLALRNQGPERTGEPSGNGLELQVLDHDEGLRLAAGKADLAADMLAMLLASLEADREAIRAARAANDHNALIERVHRLHGATRYCGVPQLRAACQRSETLLKQEDIKAFAALDELERAINRLATEARINA

SEQ ID NO: 9362 - protein, 773 aa, Azoarcus evansii
MRIVCIGGGPAGLYFAILMKKLNPVHEIRVVERNRAYDTFGWGVVFSDATMDNMREWDPETADAIQVAFNHWDDIELNFKGRTIRSGGHGFVGIGRKKMLNILQERCEALGVELEFDREVESDAEFPDADLIIASDGINSRIRNKYAEVFRPDIVTRPNRYIWLGTTKLFDAFTFYFEKTEHGWFQAHVYKFDDTTTTFIVECPEHVWKAHGLDSADQEQSIAFCEELFGKHLDGHRLMTNSRHLRGSAWLNFQRVKCEQWHHDNGRSHVVLMGDAVHTAHFAIGSGTKLALEDAIELTRLFRDEGDTREHIPTVLERYQAARNIDVLRLQNAAWNAMEWFEVCGARYCDTLEPEQFMYSMLTRSQRISHENLRLRDAAWLEGYERWLAAKSGVPVADDAVPPPMFTPFKLRGLTLANRIVMSPMAMYSAEDGAPNDFHLVHFGSRALGGAGLLYTEMTCVSPDARITPGCAGMYKPEHVNAWKRIVDFVHDNSDARIGMQLGHAGRKGATKVAWEGIDEPLEAGTWELISASAQPYLPHSQVPRAMTRDDMERVRNDFVRATRMAAEAGFDILELHCAHGYLLSSFLSPLTNRRTDEFGGGVENRARFPLEVFKAMRVLWPTNRPMSVRLSCHDWFPGGNTGDDAVAIARLFKEAGADIIDCSSGQVWKGDQPVYGRMYQTPFADRIRNEVGIPTLAVGAISEADHANSIIAAGRADLVALARPHLADPAWTLHEAAKIGFGGVAWPRQYRSARGQYETNLQRAAAAATSAR

SEQ ID NO: 9363 - protein, 469 aa, Oryza sativa
  misc_feature (205)..(205): Xaa can be any naturally occurring amino acid
MGRRSGGRKLPFFASNASTSSSTKRTRSARRLPSLTRPRASSSPSPASPSPPPPSASHPAPPSPPLAVSPAGAGKVGKKKAGARLWMRLDRWGVSETLHLDKGSIIRRAGLPPRDLRILGPVFSDSSSILAREKAMVINLEFIRAIVTADEILLLDPLTIDVIPFVEQLTHHLPLKNLVCGNGQPGGDDHGEKHDDSHGDQVPRXLNEATGAEHELPFEFQVLELALETVCSSFDVNVSGLERRATPVLEELTKNVSTRNLDRVRTLKSDLTRLLAHVQKVRDEIEHLLDDNEDMAHLYLTRKQLQNQQVEALISSAASNSIVPGGTSLSRLNNSFRRSVSIATSMHLDNDVEDLEMLLEAYFMQLDGIRNRILSVREYIDDTEDYVNIQLDNQRNELIQLQLTLTIASFGIAVNTFIAGAFAMNIQSKLYSIDDGSFFWPFVGGTSSGCFMICIVLLWYARWKKLLGP

SEQ ID NO: 9364 - protein, 213 aa, Cytophaga hutchinsonii
MIHIETLTFNPLQENTYIVYDEAGDCMIVDPGCYEAYEQKELTDFIAKKKLTVRLLVNTHGHIDHVLGNYFVKETYKVPFEIFHLDAATLQAVGAYAPNYGFFQYTPATPDRLLKEGDAVIVGSMKFDILFVPGHAPGHIAFVNTAEKICLSGDVLFRSSIGRADLPGGNYDTLIHSIKTKLFLLPDDTIVYPGHGPTTTIQFEKKHNPYCAL

SEQ ID NO: 9365 - protein, 480 aa, Glycine max
SPKPLDYGSINENVKKSQYAVRGELYLRASELQKEGKKIIFTNVGNPHALGQKPLSFPRQVVALCQAPFLLDDPNVGLLFPADAIARAKHYLSLTSGGLGAYSDSRGLPGVRKEVAEFILRRDGYPTDPELIYLTDGASKGVMQILNTIIRGQDDGILVPVPQYPLYSATIALLGGTLVPYYLEETANWGLDVNELRQSVEQARFKGITVKAMVIINPGNPTGQCLSEANLREVLQFCYQENLALLGDEVYQTNIYQDERPFISSRKVLMELGPPISKEVQLISFHSVSKGYYGECGQRGGYFEMTNIPPETVDEIYKVASISLSPNVPAQIFMGVMLNPPQPGDISYDKFVRESTGILESLRRRARIMTDGFNSCRNVVCNFTEGAMYSFPQIRLPPRALEAAKQAGKVPDVYYCLKLLEATGISTVPGSGFGQKEGVFHLRTTILPAEEDMPDIMDSFKKFNDEFMEQYEDDRGYSRL

SEQ ID NO: 9366 - protein, 485 aa, Debaryomyces hansenii CBS767
MAPVYTNSNGCPIPEPFATQRVGQHGPLLLQDFNLIDSLAHFDRERIPERVVHAKGSGAYGYFEVTDDISDVCSAAFLDTIGKKTKVLTRFSTVGGESGSADSARDPRGFSTKLYTEEGNLDLVYNNTPVFFIRDPSKFPHFIHTQKRNPETHLKDPTMFWDYLTSNQESIHQVMTLFSDRGTPASYREMNGYSGHTYKWSNKKGEWYYVQVHFISDQGVKTLTNEEAGELAGSNPDFAQEDLFKEIAKGNAPSWTCYIQTMTQEQAKKAPFSVFDLTKVWPHKDYPMRRFGKLVLNENPKNYFAEIEQAAFAPAHTVPYMEASADPVLQSRLFSYADTHRHRLGTNYTQIPVNCPITGRVFNPHMRDGGMNVNGNLGSHPNYLATSKPVEFKNFSIQEEQEVWEGAACPFHWKCTDKDYSQATALYNVLAKYPNQQKNLAHNVAVHVSGAETHIQDKVFDMFAKVHPELSANIKKEALQLSPRK

SEQ ID NO: 9367 - protein, 891 aa, Schizosaccharomyces pombe
MEYRTNNVPVGNETKSAALNALPKIKISDSPNRHHNLVDAFMQSPSYSTQPKSAVEPLGLSFSPGYISPSSQSPHHGPVRSPSSRKPLPASPSRTRDHSLRVPVSGHSYSADEKPRERRKVIGNYVLGKTIGAGSMGKVKDAHHLKTGEQFAIKIVTRLHPDITKAKAAASAEATKAAQSEKNKEIRTVREAALSTLLRHPYICEARDVYITNSHYYMVFEFVDGGQMLDYIISHGKLKEKQARKFERQIGSALSYLHQNSVVHRDLKIENILISKTGDIKIIDFGLSNLYRRQSRLRTFCGSLYFAAPELLNAQPYIGPEVDVWSFGIVLYVLVCGKVPFDDQNMSALHAKIKKGTVEYPSYLSSDCKGLLSRMLVTDPLKRATLEEVLNHPWMIRNYEGPPASFAPERSPITLPLDPEIIREMNGFDFGPPEKIVRELTKVISSEAYQSLAKTGFYSGPNSADKKKSFFEFRIRHAAHDIENPILPSLSMNTDIYDAFHPLISIYYLVSERRVYEKGGNWNRIAKTPVSSVPSSPVQPTSYNRTLPPMPEVVAYKGDEESPRVSRNTSLARRKPLPDTESHSPSPSATSSIKKNPSSIFRRFSSRRKQNKSSTSTLQNSAPLETSQSPPTPRTKPSHKPPVSYKNKLVTQSAIGRSTSVREGRYAGISSQMDSLNMDSTGPSASNMANAPPSVRNNRVLNPRGASLGHGRMSTSTTNRQKQILNETMGNPVDKNSTSPSKSTDKLDPIKPVFLKGLFSVSTTSTKSTESIQRDLMLVMGMLDIEYKEIKGGYACLYKPQGIRTPTKSTSVHTRRKPSYGSNSTTDSYGSVPDTVPLDDNGESPASNLAFEIYIVKVPILSLRGVSFHRISGNSWQYKTLASRILNELKL

SEQ ID NO: 9368 - protein, 443 aa, Brassica napus
  misc_feature (22)..(22): Xaa can be any naturally occurring amino acid
  misc_feature (41)..(41): Xaa can be any naturally occurring amino acid
RKRTTPASRTRVGNYEMGRTLXEGSFAKVKYARNTVTVDIXSAAIKILDRDKILRHKMVEQLKREISTMKLIKHPNVVEIIEVMASKTKIYIVLELVNGGELFDKIAQQGKLKEDEARRYVHQLINAVDYCHSRGVIHSDLKPENLIPDANGILKVSDFGLSAFSLQVRGDGLLHTACGTPNYVAPEVLSDKGYDGAAADVWSYGIILFVLMAGYLPFDEPNLMTLYKRICKAEFSCPSWFSPGAKEVIKRILDPSPITRISIAELLEDEWFKQGYKPPSFGQDDEDITIDDVDAAFSNSKESLVTEKKAKPESMNAFELISSSNSLENLFEKQAQLVKKETRFTSQRPASEIMSKMEETAKPLGFNVRKDKYKIKMKGDKSGRKGQLSVATEVFEVAPSLHVVELRKTGGDTLEFHKFYKNFSSGLKDVVWNTDGAPEEHKA

SEQ ID NO: 9369 - protein, 370 aa, Schizosaccharomyces pombe
MVKRHKNTIGVWRLGKTLGTGSTSCVRLAKHAKTGDLAAIKIIPIRYASIGMEILMMRLLRHPNILRLYDVWTDHQHMYLALEYVPDGELFHYIRKHGPLSEREAAHYLSQILDAVAHCHRFRFRHRDLKLENILIKVNEQQIKIADFGMATVEPNDSCLENYCGSLHYLAPEIVSHKPYRGAPADVWSCGVILYSLLSNKLPFGGQNTDVIYNKIRHGAYDLPSSISSAAQDLLHRMLDVNPSTRITIPEFFSHPFLMGCTSLSSMDSTTPPTPSLSIDEIDPLVVDCMCVLWKKSSSKKVVRRLQQRDDNDEKYVYKVLSEILRDDMLKKQRFDENKYLSLYDLIHDNNLFTKALNKFRTKASENAAY

SEQ ID NO: 9370 - protein, 96 aa, Brassica napus
  misc_feature (91)..(92): Xaa can be any naturally occurring amino acid
MASSMLSSAAVVTSPAQAAMVAPFTGLKSSAAFPVTRKSNTDITSIASNGGRVSCMKVWPPVGKKKFETLSYLPDLTDVELAKEVDYLLRXXWIPC

SEQ ID NO: 9371 - protein, 651 aa, Chlamydophila abortus S26/3
MIKILRLCALVLTCFPSFSFASELLHEEDIRKTVDKLIEYHVDIQDISSDILVRSLLGYSQSFDPHKAYLTEQEINNFIYSADIKKRLLKNYKTNNFSIYQNLNRVIKESITRARQWRAEWLSDPEALVKEAASHSLMKKPNQWARSMEEAKERQRALLLSYISVYLSDSAKDRYLGKEASLTQLCARQLEAYENPYLGINDYGEPMLPQEESHHFHVRVVKAMAHSLDAHTTYFSKEEALAMRIQLEKGMCGIGVILKEDIDGVIVKEIIPGGPAEKTGELHVDDVIYRVDGRSIENLPFRAVLDCLRGSQGSEVILDVHSKDGNRTVKLKREKISLDDRRVDVSYEAYGDGIIGKITLHSFYEGDNQISSEQDLKRAIQSLQEKNLLGLVLDIRENTGGFLSQAIKVSGLFMTNGVVVVSRYADGSIKRYRTVSPKKFYDGPLTILVSKSSASAAEIVAQTLQDYGVAIIVGDEQTYGKGTIQHQTITADANTEGFFKVTVGKYYSPSGKSTQLRGVRSDIHVASRYFAEPLGERYLEHPLPSDSCDNVMNDNLGDLDSHMRPWFQKYYIPNLQKEETVWKEMLPQLTENSRQRLSENKNYKIFLEEVKDPSEAIRPFGSNDLQMEESVNILKDMILLRDRKAAVSLGG

SEQ ID NO: 9372 - protein, 312 aa, Ostreococcus tauri
MVEKHVLSSKRSLGRFERYARAHCLNSADTSCSSLGVLSAKFMKLLSETENGILDLNHAATSLSAQKRRVYDITNVLEGIGLVSKLSKSKVALRRVDEDFVETTSGQHKEHKSLSRTVNIESSQTLPLASEDDASLHIETIRSFIRSTGIFISQADIIEQHALSSDMLIAVRAPTGAALLLPSPFTQERSPPHYRLFLRSNENSSAGVEVFTLGRRSGTCDAHDVIQILNGFSSLCREAQRAVWLLNSCDVLYFDINKDHVPVSFATILEFDNVHHNVTLIRQLPTFFLGVLFCHFLQVGNVFGTYSQGEKF

SEQ ID NO: 9373 - protein, 95 aa, Brassica oleracea var. capitata
MGRGRVEMKRIENKINRQVTFSKRRAGLLKKAHEISILCDAEVSLIVFSHKGKLFEYSSESCMEKVLEHYERYSYAEKQLKVPDSHVNAQTNWSM

SEQ ID NO: 9374 - protein, 245 aa, Paxistima canbyi
ALSIAGAVQSQKLAVRAISQLQSLPGGDIKLLCDTVVESVRDLTGYDRVMVYKFHEDEHGEVVAESKRPDLEPYIGLHYPATDIPQASRFLFKQNRVRTIVDCHASPVRVIQDDGLMQPLCLVGSTLRAPHGCHAQYMENMGSIASLAMAVIINGNDEEVIGGRNATRLWGLVVCHHTSARCIPFPLRYACEFLMQAFGLQLNMELQLAAQLSEKHVWKTRTLLCDMLLRDSPPAIVTQSPSIMD

SEQ ID NO: 9375 - protein, 160 aa, Triticum aestivum
  misc_feature (52)..(52): Xaa can be any naturally occurring amino acid
MSLIPRGKAFDPFSLDLSDPFDGFPFGSGGISSFFPSFPRASSETAAFAGAXGDFDWKETPEAHVFKADVPGLKKEEVKVEVEDGNVLQISGERNKEQEEKTGTWHRVERSSGKFLRRFRLPDNAKADQIKAAMENGVLTVTVPKKEVKEPEVKSIQISG

SEQ ID NO: 9376 - protein, 95 aa, Brassica oleracea var. gongylodes
MGRGRVEMKRIESKINRQVTFSKRRAGLLKKAHEISILCDAEVSLIVFSHKGKLFEYSSESCMEKVLEHYERYSYAEKQLKVPDSHVNAQTNWSV

SEQ ID NO: 9377 - protein, 245 aa, Paxistima myrsinites
ALSIAGAVQSQKLAVRAISQLQSLPGGDIKLLCDTVVESVRDLTGYDRVMVYKFHEDEHGEVVAESKRPDLEPYIGLHYPATDIPQASRFLFKQNRVRTIVDCHASPVRVIQDDGLMQPLCLVGSTLRAPHGCHAQYMENMGSIASLAMAVIINGNDEEIIGGRNATRLWGLVVCHNTSARCIPFPLRYACEYLLQLFGLQLNMELQLAAPLSKKHVLKTQTILYDMLLHDSPTGIVTQSPSIMD

SEQ ID NO: 9378 - protein, 209 aa, Sulfolobus solfataricus P2
MIVKNFITGPLATNSYLVIAGKEGVIIDAGGDMSELIQTVRKEKINIRYIIATHGHFDHIMGVNQIKRDFPSSTFLINEKDLGLLKRASSMAQSFLNLLISDVTKPDGFVKEGDEIELGGEKLKIIETPGHTMGSICIIANGYIFTGDTLFYGTVGRTDLGGSEKLLRESLEKLKKLPDEIIVYPGHGPFTVLGYEKVKNPFLTMDILP

SEQ ID NO: 9379 - protein, 481 aa, Colwellia psychrerythraea 34H
MKKKLTTNAGCPVANNQNVMTAGPRGPQLLQDVWFLEKLAHFDREVIPERRMHAKGSGAYGTFTVTHDITQYTRAKIFSEVGKKTEMFARFTTVAGERGAADAERDIRGFALKFYTEEGNWDLVGNNTPVFFLRDPLKFPDLNHAVKRDPRTNMRSAQNNWDFWTSLPEALHQITIVMSDRGLPATYRHMHGFGSHTFSMINADNERVWVKFHFESNQGIQNLTDQEAEVVIGQNRESHHADLYDSLESGDFPSWTLKIQVMTEEQAEKSPYNPFDLTKVWPHKDYPLIEVGVMELNRNPENFFAEVEQSAFNPASIVPGISFSPDKMLQGRLFSYGDAQRYRLGVNHQQIPVNAPRCPVHSYHRDGAMRVDGNHGSTIGYEPNTQGEWQEQPDFSEPPMELSGAAAHWNHREDEDYFSQPGDLFRLMDNSQQQALFDNTARSVGGASIDIQKRHISHCLKADQAYGAGVAKALGILLDTI

SEQ ID NO: 9380 - protein, 245 aa, Paxistima myrsinites
ALSIAGAVQSQKLAVRAISQLQSLPGGDIKLLCDTVVESVRDLTGYDRVMVYKFHEDEHGEVVAESKRPDLEPYIGLHYPATDIPQASRFLFKQNRVRTIVDCHASPVRVIQDDGLMQPLCLVGSTLRAPHGCHAQYMENMGSIASLAMAVIINGNDEEVIGGRYATRLWGLVVCHHTSARCIPFPLRYACEFLMQAFGLQLNMELQLAAQLSEKHVWKTRTLLCDMLLRDSPPAIVTQSPSIMD

SEQ ID NO: 9381 - protein, 95 aa, Brassica oleracea var. italica
MGRGRVEMKRIENKINRQVTFSKRRAGLLKKAHEISILCDAEVSLIVFSHKGKLFEYSSESCMEKVLERYERYSYAEKQLKAPDSHVNAQTNWSV

SEQ ID NO: 9382 - protein, 361 aa, Peripterygia marginata
QKLAVRAISHLQSLPGGDIKLLCDTVVESVRDLTGYDRVMVYKFHEDEHGEVVAESKRPDLEPYIGLHYPATDIPQASRFLFKQNRVRMIVDCHASPVRVIQDDGLMQPLCLVGSTLRAPHGCHAQYMENMGSIASLAMAVIINGNDEEVIGGRNATRLWGLVVCHHTSARCIPFPLRYACEFLMQAFGLQLNMELQLAAQLSEKHVLKTQTLLCDMLLRDSPTGIVTQSPSIMDLVKCDGAALYYQGNYYPLGVTPTEPQIKDIVEWLLAFHGDSTGLSTDSLADAGYAGAALLGDAVCGMAVAYITNRDFLFWFRSHTAKEIKWGGAKHHPEDKDDGQRMHPRSSFKAFLEVVKSRSLP

SEQ ID NO: 9383 - protein, 434 aa, Cytophaga hutchinsonii
MKRSIVWFKTDLRLHDNETLVRAIEQSDEIIPVYCLDEDHFKITPFGFQKTGNFRAQFLLESLNDLDTNLRKLGSGLIVVRGKPETELYKIVKQYEAFKVFAKREVAYEEQQTEARVEKEIWKLGCTFESFSTSTLYHAQDLPFSIKDIPEVFTNFRKKVEKESSIRSVFQKPAHIKSPAMPQLRLPTVKGLGLQPVIQDPRAVMKFTGGESEGCKRLTSYLFETQLISHYKNTRDGMIGSDYSTKFSPWLALGCLSPREIYTELKKYESRFSANESTYWLIFELLWRDYFRFMMKKHKHQFFLYSGIKDSANASGLQDTAILSQWINGKTGNDFIDANMLELTHTGFMSNRGRQNAASYLCNDLGIDWRYGAAYFEQQLIDYDVCSNWGNWAYLAGVGNDPRGKRNFNIEKQAEEYDPKKLFRNLWLKTTLPL

SEQ ID NO: 9384 - protein, 374 aa, Mortonia greggii
ALSIAGAVQSQKLAVRAISQLQSLPGGDIKLLCDAVVENVRNLTGYDRVMVYKFHEDEHGEVVAESKRPDLEPYIGLHYPATDIPQASRFLFKQNRVRMIVDCHSTPVSVIQDDGLMQPLCLVGSTLRAPHGCHAQYMANMGSIASLAMAVIINGNDEDGIGGRNTTRLWGLVVCHHTSARCIPFPLRYACEFLMQAFGLQLNMELQLASQLLEKHVLKTQTLLCDMLLRDSPTGIVTQSPSIMDLVKCDGAALYHQGKYYPLGVTPTEAQIKDIVEWLLAFHGESTGLSTDSLADAGYPGAALLGDAVCGMAVAYITDRDFLFWFRSNTAKEIKWGGAKHHPEDKDDGQRMHPRSSFKAFLEVVKSRSLPWEN

SEQ ID NO: 9385 - protein, 729 aa, Mannheimia succiniciproducens MBEL55E
MKKLVAQSVIDAFFDGTHSDPFAVLGMHETHNGIEIRVLLPEAHRVIVIDKETHKAVVELELVDERGFFNAIVPKANQFFAYELQVYWGKESQILEDPYRFHPMINELDNWLLAEGSHLRPYEVLGAHFVEYDNVAGVNFRVWAPNAKRVSVVGDFNYWDGRRHPMRFHPASGIWELFLPKVALGQLYKFELIDSNNQLRLKADPYAFAAQLRPDTASQVSALPEIVEMTEKRRAANQSDKPISIYEVHLGSWRRNLENNFWLDYDEIADELIPYVKEMGFTHIELLPISEYPFDGSWGYQPLGLYAPTSRFGTPDGFKRLIEKAHESGINVILDWVPGHFPSDTHGLAAFDGTSLYEYADPKEGYHQDWNTLIYNYGRHEVKNYLSGNALYWVERFGLDGLRVDAVASMIYRDYSRRDGEWVPNQYGGRENLEAIEFLKHTNYVLGTELPGVAAIAEESTSFPGVTLPPEHGGLGFHYKWNMGWMNDTLEYMKLDPVYRQYHHGKMTFAMLYQYSENFVLPLSHDEVVHGKGSLITKMSGDTWQKFANLRAYYGYMWAFPGKKLLFMGNEFAQGREWNYQESLDWFLLDDGQGGGWHSGVQRLVKDLNKTYQNQTALFELDTNPQGFEWLVVDDNQNSVFAFERRSKSGEVIIVVSNFTPVPRDNYRIGVNEPGKYEEILNTDSAYYKGSNLGNYGEVIAEEIENHGKAQSISVMVPPLATVYLRLKK

SEQ ID NO: 9386 - protein, 801 aa, Haematonectria haematococca mpVI
VEVKGEILELKNTINQMVDRLGTFAVEVSKVAREVGTDGTLGGQAQVANVEGKWKDLTENVNTMASNLTVQVRSISTVTQAIANGDMSQKIKVEANGEIQVLKETINNMVDRLSSFCYEVQRVAKDVGVDGKMGAQADVAGLDGRWKEITTDVNTMASNLTTQVRAFSDITNLATDGDFTKLVDVEASGEMDELKRKINQMISNLRDSIQRNTQAREAAELANKTKSEFLANMSHEIRTPMNGIIGMTQLTLDTDLTQYQREMLNIVNNLANSLLTIIDDILDLSKIEARRMVIEEIPYTLRGTVFDALKTLAVKANEKFLDLTYKVDSSVPDYVIGDSFRLRQIILNLVGNAIKFTEHGEVSLTIKERVEQRNVRPGEYAVEFIVEDTGIGIAKDKLDLIFDTFQQADGSMTRKFGGTGLGLSISKRVVNLMGGDLWVISEQGKGSEFHFTCLVKLAHDDAAMIEQQIRPYRGHQVLFVDKAQSKGGASIKGMLEQIGLHPVVVESEKSPALTRLQASGSLPYDAILVDSIDTARRLRAVDDFKYLPIVLLAPVVHVSLKSCLDLGITSYMTTPCKLIDLGNGMIPALENRATPSLADNTKSFEILLAEDNTVNQRLAVKILEKYHHVVTVVGNGWEAVEAVKRKKFDVILMDVQMPIMGGFEATGKIREYERGIGTHRTPIIALTAHAMMGDREKCIQAQMDEYLSKPLQQNHLIQTILKCATLGGPLLEKNRERELALHAEAKSSKHKEGGQGLLRPALESRSFTSREPLSGNGKESPALLSPDEDPMARVYMRSLSS

SEQ ID NO: 9387 - protein, 773 aa, Azoarcus evansii
MRIVCIGGGPAGLYFAILMKKLNPAHEIRVIERNRPYDTFGWGVVFSDATMDNMREWDSETADAIQVAFNHWDDIELHFKGRTIRSGGHGFVGIGRKMMLNILQARCEELGVELVFDREVESDAEFPDADLVIASDGINSRIRNKYAEVFKPDIVTRPNRYIWLGTTKLFDAFTFFFEKTEHGWFQAHIYKFDDKTTTFIVECPEHVWKAHGLDTADQEQSIAFCEQLFGKHLDGHRLMTNSRHLRGSAWLNFQRVKCEQWHHYNGKSHVVLMGDAVHTAHFAIGSGTKLALEDAIELTRLFRDEGDTREHIPAVLERYQAARNIDVLRLQNAAWNAMEWFEVCGARYCDTLEPEQFMYSMLTRSQRISHENLRLRDAGWLEGYERWLARKAGMTVRDDETPPPPMFTPFKLRGLTLANRIVMSPMAMYSAEDGAPTDFHLVHFGSRALGGAGLLYTEMTCVSPDARITPGCAGMYKPEHVNAWKRIVDFVHGNSDAKIGMQLGHAGRKGATKLAWEGIDEPLEAGAWELISASPLPYLPHSQVPRAMTRDDMERVRNDFVRATRMAAEAGFDILELHCAHGYLLSSFLSPLTNRRTDEFGGDLENRARFPLEVFKAMRAMWPTNRPMSVRLSCHDWFPGGNTADDAVAIARLFKEAGADIIDCSSGQVWKGDQPVYGRMYQTPFADRIRNEVGIPTLAVGAISEADHANSIIAAGRADLCAIARPHLADPAWTLHEAAKIGFGEVAWPKQYRSARGQYETNLQRAAAAVAGK

SEQ ID NO: 9388 - protein, 497 aa, Brassica juncea
MVALTAEKQDQNLLSRMAAGDGHGENSAYFDGWKAYEENPFHPINRPDGVIQMGLAENQLCGDLMRKWVLEHPEASICTAEGVNQFSDIAIFQDYHGLPEFRQAVAKFMEKTRNNKVRFDPDRIVMSGGATGAHETVAFCLANTGEGFLVPTPYYPGFDRDLRWRTGVNLVPVTCHSSNGFKITVEALEAAYENARVSNIPVKGLLITNPSNPLGTTLDRDCLKSLVNFTNNKGIHLIADEIYAATTFGQSEFISVAEVIEEVPHSNRDLIHIVYSLSKDMGLPGLRVGIVYSYNDRVVQIARKMSSFGLVSSQTQHLIAKMLSDEDFVDEFIRKSKLRLAARHAELTTGLDGLGIGWLKAGAGLFIWMDLRNLLKTATFDSEMELWRVIATNKVKLNVSPGGSCHCNEPGWFSMFANMDHKTMETALERIRVFTSQLEEESLKQTKPMAAPTVMAKKKMCWQSSLRLSFKDTRRFEEGFFSPHSPVPHSPLVRAQI

SEQ ID NO: 9389 - protein, 374 aa, Debaryomyces hansenii CBS767
MLQLKPRRIIFNISQNFQVIQVVGEGAYGVVCLAIHKPTGIKVAIKKLEPFEKPLFCLRALREIKLLTYFKKHENIISIFDVQKPLNFENFNEIYLIQEYMPSDLHKTIATQNLTDDHIQYFIYQILRGLKLIHSANVIHRDLKPSNILVNENCDLKICDFGLARLDILKEGYDKRLAINSGISMLTEYVATRWYRAPEIMLTSSQYSTAIDMWSVGCILAELFTCTPLFPGNDYRHQLILIFQLLGTPTDADLTCIKSQRAKNYIKTLPYCSPLSLDQVFNRHPNRAKRFGGQPINPLGLDLLKKLLVFDPKERLTVEEALEHPYVSTYHDPEDEPTIMPIPHEDFEFDKSKDKLSILELKRQLYNDIIKCNR

SEQ ID NO: 9390 - protein, 550 aa, Yersinia enterocolitica
MAAKDVKFGNDARIKMLRGVNILADAVKVTLGPKGRNVVLDKSFGSPTITKDGVSVAREIELEDKFENMGAQMVKEVASKANDAAGDGTTTATVLAQSIITEGLKAVAAGMNPMDLKRGIDKAVIAAVEELKKLSVPCSDSKAIAQVGTISANSDSTVGELIAQAMEKVGKEGVITVEEGSGLQDELDVVEGMQFDRGYLSPYFINKPETGSIELESPFILLADKKISNIREMLPVLEAVAKAGKPLLIIAEDVEGEALATLVVNTMRGIVKVAAVKAPGFGDRRKAMLQDIATLTAGTVISEEIGLELEKTTLEDLGQAKRVVINKDTTIIIDGVGDEAAIQGRVAQIRQQIEEATSDYDKEKLQERVAKLAGGVAVIKVGAATEVEMKEKKARVEDALHATRAAVEEGVVAGGGVALIRAASAITAAGLKGDNEDQNVGIKVALRAMESPLRQIVVNAGEEASVIANNVKAGSGSYGYNAYSEEYGDMIAMGILDPTKVTRSALQYAASIAGLMITTECMITDLPRDDKGADMGAGGMGGMGGMGGMM

SEQ ID NO: 9391 - protein, 478 aa, Glycine max
MAASVSTIGAVNRAPLSLNSSEAGDSVPSSAFFGTSLKKVTASRVPNVKISSGSFKIVAAEKEIDEQQQTNKDRWKGLAYDISDDQQDITRGKGMVDSLFQAPQETGTHYAVMSSFEYLSTGLKQYNLDNNMDGFYIAPAFMDKLVVHITKNFMTLPNIKVPLILGIWGGKGQGKSFQCELVFAKMGINPIMMSAGELESGNAGEPAKLIRQRYREAADIISKGKMCCLFINDLDAGAGRLGGTTQYTVNNQMVNATLMNIADNPTNVQLPGMYNKQENPRVPIIVTGNDFSTLYAPLIRDGRMEKFYWAPTRDDRVGVCKGIFRTDNVPEDEIVKLVDTFPGQSIDFFGALRARVYDDEVRKWISGVGVDLIGKKLVNSKEGPPTFDQPKMTLSKLLEYGNMLVQEQENVKRVQLADKYLNEAALGDANQDAIKRGTFYGKAAQQVKIPVPEGCTDPNASNFDPTARSDDGTCLYTP

SEQ ID NO: 9392 - protein, 509 aa, Burkholderia sp. 383
MMPPTRVVLRLAVCAAVTAALLPCASSVRAQQPASAPPASAPAAQPPSPCPPDWEPQICELKAAVEVLKKQHLTDIDIGALLDATTHAGIKTLPYARFFDAKEEQERRDDERRARDGTPGIGIVFETRPDGLHIVDVIPDAPAEKAGVRPDDLVVAMNDTSVVGIDPADLAKLSKGDAGVPLKLTVQRGPSHTVLNFAPVRTILKPHPATAKRLDGDILYTRLSSFPEPAVGDYIDAVQAARRAGPPVKGLILDLRINGGGALNAAIGITALFTGRDRTAMVTVERGDANRRRYTTNWPDYELPVMHGQDPLATLQTDVWWRTVPLVVLVDGQSASAAEATAAALKDLGRAKLLGMPTYGKGLAQTGVDLIDGTRLNFTYARNLRPNGCPMDGYGVVPDWLVPPRRDSDVDGVLLWYREADLPRAPYADRLAPDPFAKVRKERQKLREQRALAKIDTAKSAALPQREFGTATDWQLRQALAALAGRPVRTIEAKPQLMPARPVCERAGN

SEQ ID NO: 9393 - protein, 176 aa, Gossypium hirsutum
LFSFILILTHFLLKSSIRIQVLGWICVAISVSVFAAPLNIMARVVRTKSVEFMPFTLSFFLTLSAVMWFAYGLFIKDLCVALPNVLGFILGMLQMLLYAIHRHSEKVNIEEKKLPAEQMKSINVVLTTLGASEVHPVVLDIHTDDTKEEDNKNNEPTGEPDKQTDVKMEDANESPV

SEQ ID NO: 9394 - protein, 499 aa, Brucella suis 1330
MTDRPIMTTSAGAPIPDNQNSLTAGERGPILMQDYQLIEKLSHQNRERIPERAVHAKGWGAYGTLTITGDISRYTKAKVLQPGAQTPMLARFSTVAGELGAADAERDVRGFALKFYTQEGNWDLVGNNTPVFFVRDPLKFPDFIHTQKRHPRTHLRSATAMWDFWSLSPESLHQVTILMSDRGLPTDVRHINGYGSHTYSFWNDAGERYWVKFHFKTMQGHKHWTNAEAEQVIGRTRESTQEDLFSAIENGEFPKWKVQVQIMPELDADKTPYNPFDLTKVWPHADYPPIDIGVMELNRNPENYFTEVENAAFSPSNIVPGIGFSPDKMLQARIFSYADAHRHRLGTHYESIPVNQPKCLVHHYHRDGQMNVYGGIKTGNPDAYYEPNSFNGPVEQPSAKEPPLCISGNADRYNHRIGNDDYSQPRALFNLFDAAQKQRLFSNIAAAMKGVPGFIVERQLGHFKLIHPEYEAGVRKALKDAHGYDANTIALNEKITAAE

SEQ ID NO: 9395 - protein, 475 aa, Wigglesworthia glossinidia endosymbiont of Glossina brevipalpis
MIDNLIWFRKDLRLNDNPALYYACVDEYKSASGILILNKKKWNEKIVSKNRIRFMYKNIFSLKRNLKKIGIELIFYTCRDFFEYTCLLYNFCYTNKVKELYFNKGIEKEDLEEDKIIIKKLKKITKCICFNGNLLIDPEKIKNKNKKTYKVYSYFLKSCISFISNNNINIIPFPKIRKNKLNLIKSYNDSIKIKKKLSPCYEEHALNKLNNFIKLKINKYHITRDFCINSTSFLSPYINIGVLSLRECINNIKNNNFDFIEKKNSGHFKWFSEIIWREFCHHLIIEYSDFFDSKKLIKWTKYIKWENKIKKIQAWKNGTTGFPIIDAAMRQLKKTGWMHNRLRMITSSFLVKDLLVDWKIGEKYFYYHLIDGNSAINNFNWQWISSSGICSSPYFRMINPITQSKKFKSIYKYIKFWIPELKNIPFNEIHEPYNWIIKNKINYPNQIIEHKTAKINFFKACKKAIYIFKSKNINK

SEQ ID NO: 9396 - protein, 520 aa, Methanopyrus kandleri AV19
MCGIACAVGDDDIAAMVTAMEHRGPDGRGFASVSDDGVEFSEEPPSEGEVVLGHVRLWVRGEASAVQPIVEEDRAVAVNGEIYNYRRFVEDAPSDSWAVFEVVRSVRDAAAALRVLRGEYAFVAAFRDGTVVAARDPIGVRPLYYCVEAGLAVASERKALWAAGFRDVRRVPPGALLVLRDGRVELRNVVDVPRSRPGRSSWKDLLEVLQRSVRERVEETERVGVVLSGGVDSSTVAKLASEYVDVKCYAAGFEGSDDVEVAERLCDEMGWPFVSVSLEDEFERYVVATVYAVETWNPMKVEVGIPILACAGAMSDDGIRVMLSGQGADELLGGYHRHLRHYGDWDRFSWELWKDVAAIHAVNLERDDKAGMHHSVELRVPYLDLDVVRTGLGIDPRENVSGPEDNLRKRALRRVAAELGLPDFVVERRKRATQYGSLTSKMLDKLVRELGIKRAVAKRLGYRSHKELFLRLVGKYLGFPWEAPSVEEVERECARLGVEPEISEFLEERVLTFDSDLRAG

SEQ ID NO: 9397 - protein, 1014 aa, Burkholderia pseudomallei K96243
MPGKLKELLIQPFKLNHRKALFDPRRMLAHQRLLTYGGAIGISAFILFCLLLMIRMEAMDYVSNARSEFLIQQSKLTIKLQIRRTALMRAVMHAEGLWNRRIEPSTELLSQFDAHQGYAVLHTPQGAPAALAVGIPAPGRSASAFAPYLALLETQLLMGDGQSPLPDDRVEGYSFSPDGTYLSLLWSREDQAPEAFIESHSASGLIGDAMRGIRYLRDASTIVPLRADRRTVWLPPHPDPLTGKPMIRIVQPAIDATGKLFAIYVRSLPLDMFYSNLNDAPAGSTLTIVDRKGNVILGSSNQHGGDGGATASALGIRSLGDGFGGLVERYQDGMFVTSDQLPGTDWVLVHAYSWKTIAAALALRFSLVTGLVAGIIVMLWLFAIQFDRKGLIPNYRRAQRLLESEVLNRTILRTAPVGLGLLSAQDGSVLLQNNAMLELSARTSDEPLPIRLWEAYRHAVGRSSDEDGALLQHDLAIEREGANPVYLQANVVAARYRGANVLLCTLLDISLRKESELKLKEARIAADQANKAKSTFLATMSHEIRTPLNAIIGNLELLRRSPLSEQQSERLHVVESCSNALLHIINDILDLSKVESGQMTLENIPFDIHALLQETVDAYAPLAESKGLALLSSIGEGVARHYAGDPTRIRQVLSNLIGNAIKFTERGHISIDVHRAKAARDGSAIEIWVNDTGIGIRPDRIATLFDVYTQADASIHRRFGGSGLGLPLCQRLVTIMGGSIEIDSLPDFGTTVTVALPLREARHATALSNGPAARRRNATALARPTLHVLVAEDHPANRALLRDQLEALDHRVDVVENGREALRAFGEHQYDIVLTDLGMPELDGYGFARFANKMRAGTPIVAMTAHATDEDYQRSKKVGIAEIVLKPLSLTTLEKVLQRHAMRAPAEEIVTAAGPGPAHAEPRMRALPPAVAAALRTATLQSIDKIAQALAARNFETIRQELHSIKGGFALTGNRLLIARCAATEELAEAEDLDTLRAAWRKLEASLLEALERL

SEQ ID NO: 9398 - protein, 544 aa, Yarrowia lipolytica CLIB122
MVLSEHVNADKLLSNLTGKGDEHAIRALIASHTLRDPYSSKYNSQEPIPKFRIPEEGCEEKQAYQLIKDDLDLDGKPNLNLASFVNTYISDRAEKLAVENLTKNLADADEYPALMTVHARCVSILGHLWNNTDHEKAIGTATTGSSEAIHLGGLAMKKRWQEKRRAAGKSTEKPNILMAANAQVALEKFARYFDVEDRIIPVREASKHCLDLSKIKENLDENTIGIFVIMGSTYTGHYEDVQGVAKILDEYEKETGHSIDIHVDGASGAMVAPFLYPDLEWDFRVPRVKSINTSGHKFGLTTAGLGWILWRDAKYLPKELIFELHYLGGKEESYTLNFSRPGFPVLHQYYNFLHLGFDGYKQLHASSMANARLLSVFLEATGHYTCVSEIHLPANGSKPKDVKHVATADPLQYMAGLPVVAFRFSDSFRKAHPEVPQAAVSTLLRVKGYIIPNYELPPSEQKTEILRVVVRQSMSIDLLDRLMEDISAITNVLLEAVEDVKKLRAEGDHDPQLIHKYVLTLVTGKPVEEREEDWEGHSTFRAAC

SEQ ID NO: 9399 - protein, 380 aa, Gibberella zeae PH-1
MDSAARQQPQVQPCRYKVGKTLGAGSYSVVKECVHIDTGRYYAAKVINKRLMAGREHMVRNEIAVLKKVSMGHQNILTLVDYFETMNNLYLVTDLALGGELFDRICRKGSYFESDAADLVRATLSAVAYLHDHGIVHRDLKPENLLFRTPEDNADLLIADFGLSRIMDEEQFHVLTTTCGTPGYMAPEIFKKTGHGKPVDLWALGVITYFLLCGYTPFDRDSDFEEMQAILNADYSFTPIEYWRGVSAHAKDFIQRCLTIDSTKRITAHEALQHPFVAGFINAEGESQNLLPNIKKNFNARRTLHAAIDTVRAINKLREAQSGLMDGARSKEPSRGAAQQTPTNRKHPTSHPRCNPATTEIELSKLPKVSGAQRRAVRIR

SEQ ID NO: 9400 - protein, 374 aa, Mortonia greggii
ALSIAGAVQSQKLAVRAISQLQSLPGGDIKLLCDAVVENVRNLTGYDRVMVYKFHEDGHGEAVAESKRPDLEPYIGLHYPATDIPQASRFLFKQNRVRMIVDCHSTPVSVIQDDGLMQPLCLVGSTLRAPHGCHAQYMANMGSIASLAMAVIINGNDEDGIGGRNTTRLWGLVVCHHTSARSIPFPLRYACEFLMQAFGLPLNMELQLASQLLEKHVLKTQTLLCDMLLRDSPTGIVTQSPSIMDLVKCDGAALYHQGKYYPLGVTPTEAQIKDIVEWLLAFHGESTGLSTDSLADAGYPGAALLGDAVCGMAVAYITDRDFLFWFRSNTAKEIKWGGAKHHPEDKDDGQRMHPRSSFKAFLEVVKSRSLPWEN

SEQ ID NO: 9401 - protein, 374 aa, Plagiopteron suaveolens
ALSIAGAVQSQKLAVRAISQLQSLPGGDIKLLCDTVVQSVRDLTGYDRVMVYKFHEDEHGEVIAESKRPDLEPYIGLHYPATDIPQASRFLFKQNRVRIIVDCHASPVSVIQDDGLMQPLCLVGSTLRAPHGCHAQYMDNMGSIASLAMAVIINGNDEDGTGGRNPTRLWGLVVCHHTSARCIPFPLRYACEFLMQAFGLQLNMELQLAAQLLEKHVLKTQTLLCDMLLRESPTGIVTQSPSIMDLVKCDGAALYYQANYYPLGVTPTEAQIKDIVEWLLAFHGDSTGLSTDSLADAGYPGATLLGDAVCGMTVAYITNRDFLFWFRSHTAKEIKWGGAKHHPEDKDDGQRMHPRSSFKAFLEVVKSRSLPWEN

SEQ ID NO: 9402 - protein, 305 aa, Arabidopsis thaliana
MAELTQADVVYSPRSFQVWKTLVNWLAFFYQIFLQILRAVGYHPLLSSSAKASADGFKPLPAIELLDRASESPTTVEIAATTTSDSCSDGARSRFQRLKVVLDLDETLVCAYETSSLPAALRNQAIEAGLKWFELECLSTDKEYDGKPKINYVTVFERPGLHEFLEQLSEFADLILFTAGLEGYARPLVDRIDTRKVLTNRLYRPSTVSTQYRDHVKDLLSTSKNMCRTVIVDNNPFSFLLQPSNGIPCIAFSAGQPNDTQLLDVILPLLKQLSEEDDVRPTLYDRFRMPEWFEKQGIPPSCWKP

SEQ ID NO: 9403 - protein, 374 aa, Plagiopteron suaveolens
ALSIAGAVQSQKLAVRAISQLQSLPGGDIKLLCDTVVQSVRDLTGYDRVMVYKFHEDEHGEVIAESKRPDLEPYIGLHYPATDIPQASRFLFKQNRVRIIVDCHASPVSVIQDDGLMQPLCLVGSTLRAPHGCHAQYMDNMGSIASLAMAVIINGNDEDGTGGRNPTRLWGLVGWHHPSARCIPFPLRYACEFLMQAFGLQLNMELQLAAQLLEKHVLKTQTLLCDMLLRESPTGIVTQSPSIMDLVKCDGAALYYQANYYPLGVTPTEAQIKDIVEWLLAFHGDSTGLSTDSLADAGYPGATLLGDAVCGMAVAYITNRDFLFWFRSHTAKEIKWGGAKHHPEDKDDGQRMHPRSSFKAFLEEVKSRSLPWEN

SEQ ID NO: 9404 - protein, 232 aa, Triticum aestivum
  misc_feature (57)..(57): Xaa can be any naturally occurring amino acid
  misc_feature (69)..(69): Xaa can be any naturally occurring amino acid
  misc_feature (180)..(180): Xaa can be any naturally occurring amino acid
MVISHASSSAGEAVYSTFSSRYVREELPRYRMPEGSIPKEAAYQIISDELMLDGNPXRLNLASFVTTWXMEPECGKLMMDSVNKNYVDMDEYPVTTELQNRCVNMIAHLFNAPIGEDETAIGVSTVGSSEAIMLAGLAFKRKWANKMKEQGKPCDKPNIVTGANVQVCWEKFARYFEVEXLKEVQLTEGYYVMDPKKAIEMVDENTICVAAILGSTLTGEYKNGKLVNDLLG

SEQ ID NO: 9405 - protein, 544 aa, Neisseria meningitidis Z2491
MAAKDVQFGNEVRQKMVNGVNILANAVRVTLGPKGRNVVVDRAFGGPHITKDGVTVAKEIELKDKFENMGAQMVKEVASKTNDVAGDGTTTATVLAQSIVAEGMKYVTAGMNPTDLKRGIDKAVAALVEELKNIAKPCDTSKEIAQVGSISANSDEQVGAIIAEAMEKVGKEGVITVEDGKSLENELDVVEGMQFDRGYLSPYFINDAEKQIAGLDNPFVLLFDKKISNIRDLLPVLEQVAKASRPLLIIAEDVEGEALATLVVNNIRGILKTVAVKAPGFGDRRKAMLQDIAILTGGTVISEEVGLSLEKATLDDLGQAKRIEIGKENTTIIDGFGDAAQIEARVAEIRQQIETATSDYDKEKLQERVAKLAGGVAVIKVGAATEVEMKEKKDRVEDALHATRAAVEEGVVAGGGVALLRARAALENLHTGNADQDAGVQIVLRAVESPLRQIVANAGGEPSVVVNKVLEGKGNYGYNAGSGEYGDMIEMGVLDPAKVTRSALQHAASIAGLMLTTDCMIAEIPEDKPAMPDMGGMGGMGGMM

SEQ ID NO: 9406 - protein, 365 aa, Pleurostylia opposita
VQSQKLAVRAISQLQSLPGGDIKLLCDTVVESVRDLTGYDRVMVYKFHEDEHGEVVAESKRPDLEPYIGLHYPATDIPQASRFLFKQNRVRIIVDCHASPVRVLQDDGLMQPLCLVGSTLRAPHGCHAQYMENMGSIASLAMAVIINGNDEEAIDGKNPTRLWGLVVCHHTSARCIPFPLRYACEFLMQAFGLQLNMELQLAAQVLEKHVLKTQTLLCDMLLRDSPIGIVTQSPSIMDLVKCDGAALYYRGNYYPLGVTPTEAQIKDIEEWLLAFHGDSSGLSTDSLADAGYPGAALLGDAVCGMAVAYITNRDFLFWFRSHTAKEIKWGGAKHHPEDKDDGQRMHPRSSFKAFLEVVKSRSLPW

SEQ ID NO: 9407 - protein, 540 aa, Rubrobacter xylanophilus DSM 9941
MAHKELKFNTEARQALERGVNKLADAVKVTLGPKGQYVVLDKKFGSPTITNDGVTIAREIELEDIFENQGAQLLKEVATKTNDVAGDGTTTATVLAQIIVREGLKNVAAGANPVILRNGIEKAVEKAVEAIREQAKEISGKDEIARVGAISARSEEVGNVIAEAIDKVGKDGVVNVEEGQTLGIDLEFTEGMQFDKGYLSPYFVTDQDRMEAVLEDPYILIANQKISNVQDLLPLLNQVMQANKPLLIIAEDVEGEALATLIVNKLRGTFQSCAVKAPGFGDRRKRMMEDIAILTGGEVITEELGLKLENTQLSQLGRARKVVVTKDDTTIVDGAGDPEQIKGRINQIKAELETTDSDFDREKLQERLAKLAGGVAVIKVGAATETELKEKKHRVEDALSATRAALEEGIVPGGGVALLKAQKAVGELLDELDGDERTGARIVYRALEEPIRQIAENAGADGSIVVDKVRAQGDSIGFNALTGGYEDLVAAGVIDPAMVTRSALQNAASIAGLLVTTDVVVAEPEEEQPAMPGGGMGGMM

SEQ ID NO: 9408 - protein, 374 aa, Pristimera andina
ALSIAGAVQSQKLAVRAISQLQSLPGGDIKLLCDTAVESVRDLTGYDRVMVYKFHEDEHGEVVAESKRPDLEPYIGLHYPATDIPQASRFLFKQNRVRIIVDCHASPVNVIQDGGLMQPLCLVGSTLRAPHGCHAQYMENMGSIASLAMAVVINGNDEDGIGGRNPTRLWGLVVCHHTSARCIPFPLRYACEFLMQAFGLQLNMELQLAAQLLEKHVLKTQTLLCDMLLRESPTGIVTQSPSIMDLVKCDGAALYYQANYYPLGVTPTEAQIKDIVEWLLVFHGDSTGLSTDSLADAGYPGATLLGDAVCGMAVAYITNRDFLFWFRSHTAKEIKWGGAKHHPEDKDDGLRMHPRSSFKAFLEVVKSRSLPWEN

SEQ ID NO: 9409 - protein, 395 aa, Methanosarcina acetivorans C2A
MNEQGLSEKEIFSYLENAKSEDTDYYRVLSSMCTHPHKIAVEANRLFIEANLGDLGLFAGASRLEQEVVGMLGELLHAPSIDVPFGGSCESSACGYLTTGGTESNIQAVRGMKNLVTTGKKELKGAPNIVIPESAHFSFDKVADMMGIEVRRASLDSEFRVDMASIESLIDANTIGLIGIAGNTEFGQIDPIDKLSEIALENELFLHIDAAFGGFVIPFLEKPQPFDFKLPGVTSIAVDPHKMGLSTIPSGALLFRSASFLDSLKVNTPYLTTKAQFTLTGTRSGASAAATCAVMKYLGNEGYRKNVQYCMQLTEKLVIEARKIGFEPLLEPVMNVVALKVPNPDFVREQMLERFGWNVSITRTPRALRLVLMPHNTLEDIEIFVQDLKEVTVEI

SEQ ID NO: 9410 - protein, 215 aa, Cucumis sativus
EIKRIENTTNRQVTFCKRRNGLLKKAYELSVLCDAEVALIVFSSRGRLYEYANNSVKATIDRYKKASSDSSNTGSTSEANTQFYQQEAAKLRVQIGNLQNPNRNMLGESLSSLTAKDLKGLETKLEKGISRIRSKKNELLFAEIEYMRKREIDLHNNNQMLRAKIAESERNVNMMGGEFELMQSHPYDPRDFFQVNGLQHNHQYPRQDNMALQLV

SEQ ID NO: 9411 - protein, 693 aa, Oryza sativa (japonica cultivar-group)
MGGGGGGDAGGRTVVWFRRDLRVEDNPALAAAARAGGEVVPAYVWAPEEDGPYYPGRVSRWWLSQSLKHLDASLRRLGAGKLVTRRSADAVVALLQLVRDTGATRLFFNHLYDPISLVRDHRLKEMMAAEGIIVQSFNADLLYEPWEVVDDEGQSFTMFAPFWNRCLSMPYDPAAPLLPPKRINSGDLSMCPSDDLIFEDDSERGSNALLARAWSPGWQNADKALTAFLNGPLIHYSVNRKKADSASTSLLSPYLHFGELSVRKVFHLVRMKQLVWSNEGNRAAEESCTLFLRSIGLREYSRYLSFNHPCSHEKPLLAHLRFFPWVINECYFKIWRQGRTGYPLVDAGMRELWATGWLHDRIRVVVSSFFVKVLQLPWRWGMKYFWDTLLDADLESDALGWQYISGSLPDGRELDRIDNPQLEGYKFDPHGEYVRRWLPELARLPTEWIHHPWDAPASVLQAAGVELGSNYPLPIVGLDAANARLQEALSEMWQLEAASRAAMDNGMEEGLGDSSEVPPIEFPRELQMEVDREPARVTANVLTTARRREDQMVPTMTSSLNRAETEISADFMNSVDSRAEVPTRVNFEPRTEREENFRTTAGNVARTNGIHEHNNFQQPQHRMRNVLAPSVSEASSGWTGREGGVVPVWSPPAASDHSETFASDEADISSRSYLDRHPQSHRLMNWSQLSQSL

SEQ ID NO: 9412 - protein, 445 aa, Synechococcus sp. WH 8102
MPSAKGLRGVLRSGPLLLMLGLGGMAVSMAGPSLGLTGASGGAITDSPKEVIDQVWQIVFRDYLDSTGAYSDARWRQLRKDLLAKSYAGDEESYEAIRGMLSSLDDPYTRFLDPKEFKEMRIDTSGELMGVGIQLSLDKDTKELIVVSPIEGTPASRAGVQPKDVIVSIDGAPTKGMTTEEAVKLIRGPEGTEVILGLRRKGVVLNVSLTRARIEIHAVKKALNTSANGSKIGYIRLKQFNANASREMRAAIQDLDEQGAQGYVLDLRSNPGGLLEASIDIARQWLNEGTIVSTRTREGIRDVRRATGSAITDKPMVVLIDQGSASASEILSGALQENKRAQLVGQKTFGKGLVQAVRGLSDGSGMTVTIAKYLTPNGTDIHKNGIKPDVEAAMSEKEMKDFKIENLGTSKDSQYRVAETTLIKVLRMQKNEAYRPGSANLKAAL

SEQ ID NO: 9413 - protein, 492 aa, Oryza sativa (japonica cultivar-group)
MDPYKHRPSSSFNGPLWSTNSGAPVWNNNNSLTVGSRGPILLEDYHLVEKLANFDRERIPERVVHARGASAKGFFEVTHDITHLTCADFLRAPGVQTPVIVRFSTVIHERGSPETLRDPRVFAIKFYTREGNWDLVGNNFPVFFIRDGMKFPDMVHSLKPNPKSHVQENWRILDFFSHHPESLHMFTFLFDDIGIPADYRHMDGSGVNTYTLVNRAGKSHYVKFHWKPTCGVKSLLDDEAVTVGGTNHSHATQDLYDSIAAGNFPEWKLFIQTIDPDHEDRFDFDPLDVTKTWPEDIVPLQPVGRMVLNRNIDNFFSENEQLAFCPGIIVPGIYYSDDKLLQTRIFSYSDTQRHRLGPNYLLLPPNAPKCAHHNNHYDGFMNFMHRDEEVDYFPSRYDPAKHAPRYPIPSATLTGRREKVVIAKENNFKQPGERYRSWDPARQDRFIKRWIDALSDPRLTHEIRSIWLSYWSQADRSLGQKLASRLSAKPSM

SEQ ID NO: 9414 - protein, 325 aa, Debaryomyces hansenii CBS767
MPQHKLATEVYFDLNDGHKIPALGLGTVPPEDNAEVKDQVITAVRAGYRHIDTAWYYGTEPYIGEALKVLFAEGYKREDLFITSKVWPSFHHSPEKSLDKSLSALGIEYVDLFLQHWPVCLSGDENGLPAAPKNDDGSLKYDDDPVDGVGFIETYKKLEDIKATNKARSIGVSNYSIPRLRKLLQKAKIVPVLNQIEYHPQLPQQDLVDFCQKHKILVEAYSPVGGPGAPVLKLPYINELAEKYEVSVNEITNAYHILQGRITLPRSSNLERIKTNVRLPQLTKDELDKLYQIGVENPTRYLVDSWGYGIGFRWWKGDTWSKEFD

SEQ ID NO: 9415 - protein, 237 aa, Lycopodium annotinum
MGRGKIEIKRIENATCRQVTFSKRRSGLLKKAHELSVLCDAQVAVIIFSSTGKLFQFASTRMKEILERYERNSDPLQIDAVIPRDLEYWSREAAKAKDELDRCHQKNRHMLGEDLSALNLNELEELEQQLDSGLRRVRCRKDQVLRDRIEELTKQESFLREENRMLRSKIAVPKESTEPILDEMNMETREPPSMAIVEEELSLKLNSKTWPDIHFSLQLGQYQPPRTETPTANHRPN

SEQ ID NO: 9416 - protein, 400 aa, Saccharomyces cerevisiae
MPFVKGFEPISLRDTNLFEPIKIGNTQLAHRAVMPPLTRMRATHPGNIPNKEWAAVYYGQRAQRPGTMIITEGTFISSQAGGYDNAPGIWSDEQVAEWKNIFLAIHDCQSFAWVQLWSLGWASFPDVLARDGLRYDCASDRVYMNATLQEKAKDANNLEHSLTKDDIKQYIKDYIHAAKNSIAAGADGVEIHSANGYLLNQFLDPHSNKRTDEYGGTIENRARFTLEVVDALIETIGPERVGLRLSPYGTFNSMSGGAEPGIIAQYSYVLGELEKRAKAGKRLAFVHLVEPRVTDPSLVEGEGEYSEGTNDFAYSIWKGPIIRAGNYALHPEVVREQVKDPRTLIGYGRFFISNPDLVYRLEEGLPLNKYDRSTFYTMSAEGYTDYPTYEEAVDLGWNKN

SEQ ID NO: 9417 - protein, 574 aa, Avena sativa
MALLCSALSNSTHPSFRSHIGANSENLWHLSADPAQKSKRRCNLTLSSRAARISSALESAKQVKPWQVPKRDWFPPEFMFGAASAAYQIEGAWNEGGKGPSSWDNFCHSHPDRIMDKSNADVAANSYYMYKEDVRMLKEIGMDSYRFSISWPRILPKGTLDGGINHEGIQYYNDLLDCLIENGIKPYITLFHWDTPQALADEYKDFLDRRIVKDYTDYATVCFEHFGDKVKNWFTFNEPHSFCGLGYGTGLHAPGARCSAGMTCVIPEEDALRNPYIVGHNLLLAHAETVDVYNKFYKGDDGQIGMVLDVMAYEPYGNNFLDQQAQERAIDFHIGWFLEPMVRGDYPFSMRSLVGDRLPFFTKSEQEKLVSSYDFVGINYYTSRFAKHIDISPEFIPKINTDDVYSNPEVNDSNGIPIGPDVGMYFIYSYPKGLKNILLRMKEKYGNPPIYITENGTADMDGWGNPPMTDPLDDPLRIEYLQQHMTAIKEAIDLGRRTLRGHFTWSLIDNFEWSLGYLSRFGIVYIDRNDGCKRIMKKSAKWLKEFNGATKKLNNKILGASSCCSGVTHGGGTA

SEQ ID NO: 9418 - protein, 445 aa, Oryza sativa
  misc_feature (6)..(6): Xaa can be any naturally occurring amino acid
MAPTTXAAAAASSNGGGESDGSSKEWRLTAPTRGGAMAAAGDKMSIRAVRYKISASVDDRGPRPVLPLAHGDPSVFPEFRTAAEAEDAVADALRSGDFNCYPAGVGLPAARRAVADHLSRDLPYKLSSDDIFLTAGGTQAIEVVISILAQPGTNILLPRPGYPNYEARAAFNNLEVRHFDLIPEKGWEIDLNSLESIADKNTTAIVIINPNNPCGNVYTYEHLSKVAEVARKLGILVITDEVYGNLVFGSSPFVPMGCFGHIVPILTIGSLSKRWIVPGWRLGWVAICDPKKTLQETKIATLITNFLNVSTDPATFIQGALPNILKNTKEEFFKRIIDLLTETSDICYRGIKDIKCITCPHKPEGSMFVMVKLNLYLLEGIHDDVDFCCQLAKEESVILCPGSVLGMKNWVRITFAIDSSSLLDGLERIKSFCQRHKKKNPLNYI

SEQ ID NO: 9419 - protein, 594 aa, Sporobolomyces singularis
MMLHAALLVALPCVVLARPAGAVTYPGAIPLSLTSNYETPSPTAIPLEPTPTATGTAELDALWNLVEAQYPVQTAAVTTLVTVPDDYKFEADPPSYALAGYETSEIAGLKFPKGFKFGVAGAAIQVEGAAKAEGRGPSTWDYLCHHYASTQCNNYDPDITTNHYYLYPLDFARLQHLGINTYSFSISWTRIYPLGAGYVNEAGLAHYDAVIHSAKKYGLEPVGTVFHWDTPLSLMLKYGAWQDTGDQIVKDFVTYATTVFKRYGNEVKTWFTFNEPRVFCSQNSGLPYNLTYPEGINSTSAVFRCTYNVLKAHGHAVKVYRDLVASGTIAAGEIGFKSDDNYPIPARPGNADDEESAKRHEAFRIGIFAQPVYGNGDYPDVVKETVGDMLPALTDEDKGYIKGSGDIFAIDGYRTDISHAALNGIANCIRNQSDPNWPVCEEGSDPFAHVYPSGFAIGQSADPLSSWLVNSAPFIRDQLKFLTQTYPAKGGIYFSEFGWAEDAEYDRQLLYQITWDGLRTQYLTDYLSQLLLAVHKDGINLRGALTWSFVDNWEWGLGMQQKFGFQFVNQSDPDLTRTFKLSAHAYAQFGRNHL

SEQ ID NO: 9420 - protein, 129 aa, Gibberella zeae PH-1
MSMWLTDTQKIGVVFCSGGFANFLSRLAMGNILFLIGLTIIIGPQKTLLFFARKQKAKGTAAFFLGLILIFMKWTFIGFLVEAYGIVVLFGDFLGTIAGFAQGLPVVGPYIGMIVDRIGLGRRNAELPV

SEQ ID NO: 9421 - protein, 374 aa, Pristimera andina
ALSIAGAVQSQKLAVRAISRLQSLPGGDIKLLCDTAVESVRDLTGYDRVMVYKFHEDEHGEVVAGSKRPDLEPYIGLHYPATDIPQASRFLFKQNRVRIIVDCHASPVNVIQDDGLMQPLCLVGSTLRAPHGCHAQYMENMGSIASLAMAVVINGNDEDGIGGRNPTRLWGLVVCHHTSARCIPFPLRYACEFLMQAFGLQLNMELQLAAQLLEKHVLKTQTLLCDMLLRESPTGIVTQSPSIMDLVKCDGAALYYQANYYPLGVTPTEAQIKDIVEWLLVFHGDSTGLSTDSLADAGYPGATLLGDAVCGMAVAYITNRDFLFWFRSHTAKEIKWGGAKHHPEDKDDGLRMHPRSSFKAFLEVVKSRSLPWEN

SEQ ID NO: 9422 - protein, 374 aa, Psammomoya choretroides
ALSIAGAVQSQKLAVRAISQLQSLPGGDIKLLCDTVVESVADLTGYDRVMVYRFHEDEHGEVVAESKRPDLEPYIGLHYPATDIPQASRFLFKQNRVRMIVDCHASPVHVIQDDGLMQPLCLVGSTLRAPHGCHAQYMENMGSIASLAMAVIINGNDEEVIGGRNPTRLWGLVVCPHTSARCIPFPLRYACEFLMQAFGLQLNMELQLAAQLLEKHVLKTQTLLCDMLLRDSPTGIVTQSPSIMDLVKCDGAALYYRGNYYPLGVTPTEAQIKDIVEWLLAFHGDSTGLSTDSLADAGYPGAALLGDAVCGMAVAYITNRDFLFWFRSHTAKETKWGGAKHHPEDKDDGQRMHPRSSFKAFLEVVKSRSLPWEN

SEQ ID NO: 9423 - protein, 515 aa, Kluyveromyces lactis NRRL Y-1140
MASIDESGEVYCDKEVVTKVFARLTTKSENRACFDCGAKNPTWTSVPFGVLLCIDCSGEHRNMGTHITFVKSSNLDKWTVNNLRRFKLGGNDKAKDFFLKNNGKQYLGSSSNRMAKYTSQVAKKWQSHLNQKVARDAEQHPGEIVFSAEDEQEFTGGSSGSSKSNSVDDFFSNWEKPVNQSNISLTSSPRNLTPTNTGNRNGSSILSGSGSANKTSNGARSTTTKRTTLTGSAGSSQAKKHSILSSSRKSKKPVAAKKVDADLFDQFEKEAKEEEELASSLATTSLNSNNLSNSIYDATPAPFQQKSGFSSSSKITKPSTNVEDAEDDEWSNRYNDGITFDQINASNVGLTGSKDAAKPKLAKLGFGMTSNNAEKEQNKTNESRRAASGPKYTGKIAQKFGEQKGISSDQVFSRGSYDDEASKEAQEKLRQNFSNATSISSASYFGEGQSEDQFDEFGRPLNPQNGTRTNRSGSLGGRNFMEFTSGADDEFDLLKNAVEQGAQKLGNYLRDYMRN

SEQ ID NO: 9424 - protein, 107 aa, Hordeum vulgare subsp. vulgare
MAEAAHGGGLRGRGVLLGGVQDAPAGRENDLETIELARFAVAEHNAKANALLEFEKLVKVRQQVVAGCMHYFTIEVKEGGAKKLYEAKVWEKAWENFKQLQEFKPAA

SEQ ID NO: 9425 - protein, 374 aa, Psammomoya choretroides
ALSIAGAVQSQKLAVRAISQLQSLPGGDIKLLCDTVVESVADLTGYDRVMVYRFHEDEHGEVVAESKRPDLEPYIGLHYPATDIPQASRFLFKQNRVRMIVDCHASPVHVIQDDGLMQPLCLVGSTLRAPHGCHAQYMENMGSIASLAMAVIINGNDEEVIGGRNPTRLWGLVVCHHTSARCVPFPLRYACEFLMQAFGLQLNMELQLAAQLLEKHVLKTQTLLCDMLLRDSPTGIVTQSPSIMDLVKCDGAALYYRGNYYPLGVTPTEAQIKDIVEWLLAFHGDSTGLSTDSLADAGYPGAALLGDAVCGMAVAYITNRDFLFWFRSHTAKETKWGGAKHHPEDKDDGQRMHPRSSFKAFLEVVKSRSLPWEN

SEQ ID NO: 9426 - protein, 896 aa, Pseudomonas viridiflava
MAAVLGGYFTWMQLYELQSQLLQRGEMIAQDLAPLSANALGRKDKILLTRIATQTLEQSDVRAVSFLDTDRSVLAHAGPTMISPSPIGSSTQLLNSSGNDATRYLLPVFGHQRHLTSPIIPAEADTLLGWVELEISHNGTLLRGYRSLFASLLLIFTGLAFTAILAVRMSRTINGPLSQIKQAVSQLKDGNLETRLPPLGSRELDELASGINRMAATLQNAQEELQMSIDQATEDVRQNLETIEIQNIELDLARKEALEASRIKSEFLANMSHEIRTPLNGILGFTHLLQKSELTPRQYDYLGTIEKSADNLLSIINEILDFSKIEAGKLVLDNIPFNLRDLLQDTLTILAPAAHAKQLELVSLVYRDTPLALSGDPLRLRQILTNLVSNAIKFTRQGTIVARAMLEDETEEHAQLRISVQDTGIGLSSQDVRALFQAFSQADNSISRQPGGTGLGLVISKRLIEQMGGEIGVDSTPGEGSEFWISLNLPKAREDREETANQALEGLRAAVLEHHDLARQALEHQLEDCGLQTVVFTNLENLLNGVTAAHETPQAIDLVVLGVTALEISPERLRQHIWDLENLNCKVMVLCPTTEHALFQMSVHDVYTQLQAKPACNRKLQKALSELVAPRAVRTDVALPLSSRAPRVLCVDDNPANLLLVQTLLEDMGAEVVAVDGGYAAVSAVQQEAFDLVLMDVQMPGMDGCQATEAIRAWETERNQTSLPIVALTAHAMANEKRSLLQSGMDDYLTKPISERQLAQVVLKWTGLALRNPIPERQTESSNAHVGPLVLDHEEGLRLAAGKPDLAADMLAMLLASLDADREAIRAARANDDIQGLIERVHRLHGATRYCGVPQLRTACQRAETLLKQNAPHTEDALDDLDKAITRLEAEARVTA

SEQ ID NO: 9427 - protein, 374 aa, Pterocelastrus tricuspidatus
ALSIAGAVQSQKLAVRAISQLQSLPGGDIKLLCDTVVESVRDLTGYDRVMVYKFHEDEHGEVMAESRRPDLEPYIGLHYPASDIPQASRFLFKQNRVRMIVDCHASPVLVIQDDGLMQPLCLVGSTLRAPHGCHAQYMENMSSIASLAMAVIINGSDEEGVGGRNPTRLWGLVVCHHTSARCIPFPLRYACEFLMQAFGLQLNMELQLAAQLLEKHVLKTQTLLCDMLLRDSPTGIVTQSPSIMDLVKCDGAALYYQGNYYPLGVTPTEAQIKDIVEWLLAFHGDSTGLSTDSLADAGYPGAALLGDAVCGMSVAYITNRDFLFWFRSHTAKEIKWGGAKHHPEDKDDGQRMHPRSSFKAFLEVVKSRSLPWEN

SEQ ID NO: 9428 - protein, 344 aa, Arabidopsis thaliana
MDHAADAHRTDLMTITRFVLNEQSKYPESRGDFTILLSHIVLGCKFVCSAVNKAGLAKLIGLAGETNIQASFGEEQKKLDVLSNDVFVNALVSSGRTSVLVSEEDEEATFVEPSKRGKYCVVFDPLDGSSNIDCGVSIGTIFGIYTLDHTDEPTTADVLKPGNEMVAAGYCMYGSSCMLVLSTGTGVHGFTLDPSLGEFILTHPDIKIPNKGNIYSVNEGNAQNWDGPTTKYVEKCKFPKDGSPAKSLRYVGSMVADVHRTLLYGGIFLYPADKKSPNGKLRVLYEVFPMSFLMEQAGGQAFTGKKRALDLVPEKIHERSPIFLGSYDDVEEIKALYAEEEKKN

SEQ ID NO: 9429 - protein, 152 aa, Nocardia farcinica IFM 10152
MEVIAVLRFDPFHDIDTVARHLLGEGTGTARAPRFMPMDLFKAGDHYVLNADLPGVDPGSVDVSVDNGTLTLRAQRSVPSEEGVQWIASERFAGTYMRQLSLGDNVDTDKISATYNNGVLSVTIPIAEKAKPRRIEITGGSEQKTIEASSNN

SEQ ID NO: 9430 - protein, 61 aa, Cucumis melo
DTLLDADLESDALGWQYISGTLPDSREFDRIDNPQLEGYKFDPNGEYVRRWLPELSRLPTE

SEQ ID NO: 9431 - protein, 372 aa, Bradyrhizobium sp. BTAi1
MSDLDTSVLFRPFRLKTLELKNRIVMAPMTRNAAPNGIPGEANVAYYRRRAEGGVGLILTEGTVVNRPASKNEPNIPFFHGDAALAGWQSVASAVHAAGGRIAPQIWHTGSTKGMSRWEPDAPVESPSGLVAPDKPRGKVMTENDIADTVAAFAQAAADAKRTGFDTVEIHGAHGYLIDQFFWSGTNKREDRYGGATIKERSRFAGEIVAAIRKAVGPDFPIILRVSQWKQQDYAARLAETPALMGDWLQPLVDAGVDILHCSQRRFWEPEFPEIDGEKGLNFAGWAKKITGAATISVGSVGLSGDFFSAFAGKPSTTADLDALLERMAKDEFDLIAVGRVLISDADWVAKIKAGDKSSLKGFNAADLGALV

SEQ ID NO: 9432 - protein, 485 aa, Solibacter usitatus Ellin6076
MLRSTLVLLCTACLLSAQDDFEKQMRSVIGAYAIAAENAADPITSEQAFYAGAIPGLLRKLDPHSIFFDPEQFEQLKRMESSTSKGFGSVVSILPGRVIVLQTISGTPSQKAGLAPGDEILAINGYVIGQLDIEQLPQLLEQSRQRQARLDVRRPGVPGLMHFTLTPEEMQSPSVDRAFFLAAGIGYIRVSSFDEKTGQQIKAAIEKLGGDRLAGLVLDLRNNPGGVLGAAIETCSLFLKPGMKIVTVRGRHVPETTEVVPSIAAPYGFKLAILVNEKSASASEVVSGAMQDHDRATIIGVPSFGKGLVQSVFPLTQNTGLALTTALYYTPSGRSIQKPLDSAKFALGPTTAHPNAQSEFHTDKGRRVTGGGGIQPDFVVNPSPSNRLRAVLDASASFTNFATEYLRAHKVDADFEVTPELLDQFRVFLSDREIRPGLAEWLTERDFVSNRLKTELFNQAIGVEKGDEVEAQRDPVILKALEVIG

SEQ ID NO: 9433 - protein, 616 aa, Streptococcus suis 89/1591
MEIAMTEFTDLDLYYMNAGEHTTLYEKMGAHIIKERNKIIGTQFRVYAPNAREVFLVGNFNEWQRSHSMEREIDGVFQLYVDGLKSLEDYKYLIITHDGREIYKADPYAFFSQVRPDTASTTYNSRYKFKDDIWMYNRVNYDFKEQPVSIYEVHLGSWKQKFANKNEGGAPVEAFNSYKEITPLLIEHIRENNYTHIELLPITEHPLDASWGYQVTGYYSPTSRYGKPDELKYLVDQCHQAGIGVILDWVPLHFCKDAHGLYQFDGSWLYEYSYEQDRENHQWGTANFDLGKGLTRSFLLSNLKYWLEYFHFDGIRVDALSYLLYWRGETDEDKINHAAIDFIKRVNAMVHTDYKGVLMIAEDSSSFPKVTHSLENGGIGFDMKWDLGWMNDTLKFVERPAIYRKYHSNEITFGMYYNQNEQFLLPLSHDEVVHGKHSIIEKMNGDYEDKFHLARVYYSFYFAHPGKKLLFMGNEWGHIREWHEYTEMDWGLLQFPIHHSFYQMMKTLSTFYKEHDAFWKYDYQAYEKGFNWVKIDEEASLYAFSRTSDEQEILTIHNFNDQELFDVHLDLPADSEYKLVFSSNAIPMDTFSLYPDENGARITVPRLTSFYLERVK

SEQ ID NO: 9434 - protein, 715 aa, Neurospora crassa
SKKVDDLKNEFKETDKSARLTTDYGVKQTTADDWLRIVSDDKIGPSLLEDPFARERIMRFDHERIPERVVHARGSGAFGKFKVYESASDLTMAPVLTDTSRETPVFVRFSTVLGSRGSADTVRDVRGFAVKFYTEEGNWDLVGNNIPVFFIQDAIKFPDVIHAGKPEPHNEVPQAQSAHNNFWDFQFNHTEATHMFTWAMSDRAIPRSLRMMQGFGVNTYTLINAQGKRHFVKFHWTPELGVHSLVWDEALKLAGQDPDFHRKDLWEAIENGAYPKWKFGIQAIAEEDEHKFDFDILDATKIWPEDLVPVRYIGEMELNRNPDEFFPQTEQIAFCTSHVVNGIGFSDDPLLQGRNFSYFDTQISRLGVNFQELPINRPVCPVMNFNRDGAMRHTISRGTVNYYPNRFDACPPASLKEGGYLEYAQKVAGIKARARSAKFKEHFSQAQLFYNSMSPIEKQHMINAFGFELDHCEDPVVYGRMVQRLADIDLGLAQTIAEMVGGEAPTTTNHPNHGRKTINLSQTEFPPATPTIKSRRVAIIIADGYDNVAYDAAYAAISANQAIPLVIGPRRSKVTAANGSTVQPHHHLEGFRSTMVDAIFIPGGAKAAETLSKNGRALHWIREAFGHLKAIGATGEAVDLVAKAIALPQVTVSSEAEVHESYGVVTLKKVKPESFTDAVKIAKGAAGFLGEFFYAIAQHRNWDRELDGLHSMIAY

SEQ ID NO: 9435 - protein, 538 aa, Corynebacterium glutamicum ATCC 13032
MAKLIAFDQDAREGILRGVDALANAVKVTLGPRGRNVVLDKAFGGPLVTNDGVTIARDIDLEDPFENLGAQLVKSVAVKTNDIAGDGTTTATLLAQALIAEGLRNVAAGANPMELNKGISAAAEKTLEELKARATEVSDTKEIANVATVSSRDEVVGEIVAAAMEKVGKDGVVTVEESQSIETALEVTEGISFDKGYLSPYFINDNDTQQAVLDNPAVLLVRNKISSLPDFLPLLEKVVESNRPLLIIAEDVEGEPLQTLVVNSIRKTIKVVAVKSPYFGDRRKAFMDDLAIVTKATVVDPEVGINLNEAGEEVFGTARRITVSKDETIIVDGAGSAEDVEARRGQIRREIANTDSTWDREKAEERLAKLSGGIAVIRVGAATETEVNDRKLRVEDAINAARAAAQEGVIAGGGSALVQIAETLKAYAEEFEGDQKVGVRALATALGKPAYWIASNAGLDGSVVVARTAALPNGEGFNAATLEYGNLINDGVIDPVKVTHSAVVNATSVARMVLTTEASVVEKPAEEAADAHAGHHHH

SEQ ID NO: 9436 - protein, 241 aa, Zymomonas mobilis subsp. mobilis ZM4
MTIEIVAVPAFETNYIWLLHDKVSDKTVVVDPGQAEPVLDFIQKKGWEVTQIWNTHWHNDHTGGNEVIKAETGCDVIGPSHESHPIPAIDIKVDEGDEIGLGSLVAKVMAIPAHTLGHVAYYIPDHHVLFCGDTLFAMGCGRIFEGTAEQMWQALQRFAALPPETKVYCGHEYTQDNGHFALTVDPDNQALQKRVKEVDLLRAQGKITLPTTIALEKATNPFMRAKNPEELAKLRKAKDIF

SEQ ID NO: 9437 - protein, 670 aa, Bacteroides thetaiotaomicron VPI-5482
MKETLNIIKNDPWLEPFADAITGRHQYALNKEAELTNKGKQTLSDFASGYLYFGLHRTPKGWTFREWAPNATHIYMVGTFNNWEEKAAYKLKKLKNGNWEINLPADAIHHGDLYKLNVYWDGGQGERIPAWATRVVQDEQTKIFSAQVWAPEKPYKFKKKTFKPTTNPLLIYECHIGMAQQEEKVGTYNEFREKTLPRIAQEGYNCIQIMAIQEHPYYGSFGYHVSSFFAASSRFGTPDELKALIDAAHEMGIAVIMDIVHSHAVKNEVEGLGNFAGDPNQYFYPAPRREHPAWDSLCFDYGKNEVIHFLLSNCKYWLEEYKFDGFRFDGVTSMLYYSHGLGEAFCNYGDYFNGHQDGNAICYLTLANELIHQVNPKAISIAEEVSGMPGLAAKVEDGGYGFDYRMAMNIPDYWIKTIKEKIDEDWKPSSMFWEVTNRRQDEKTISYAESHDQALVGDKTIIFRLIDADMYWHMQKGDENYVVNRGIALHKMIRLLTSSTINGGYLNFMGNEFGHPEWIDFPREGNGWSCKYARRQWDLVDNKNLAYHYMGDFDAEMLKVIKSVKDFQATPVQEIWHNDGDQVLAYGRKDLIFVFNFNPKQSFVDYGFLVSPGAYEVILNTDNVAFGGNGLADDSVVHFTIADPLYKKEKKEWLKLYIPARTAVVLRKKK

SEQ ID NO: 9438 - protein, 325 aa, Zea mays
IPGSTHASGYPLVDAGMRELWATGWTHNRIRVIVSSFAVKFLQIPWIWGMKYFWDVLLDADLESDILGWQYISGSLPDGHELSRLDNPEVQGQKYDPDGEYVRTWIPELARMPTEWIHSPWAAPNSILQVAGVELGFNYPKPIVELHMARECLDDAISTMWQLDTAAKLAELDGEVVDDNLNNIRNFDIPKVVLNKKLSPSTSSMEHRVLSTNGKDEKSQPTEVKALYKQIIRDDMMNDSNMDDTCSTANLKVTRKRSSSDSAFNVPSCSSSLVMESRIHHNEPSSVLYSGYFQKTADRDGTSKVEDNDSEDSGTSISRPSKKAA

SEQ ID NO: 9439 - protein, 245 aa, Putterlickia verrucosa
ALSIAGAVQSQKLAVRAISQLQSLPGGDIELLCDTVVESVRDLTGYDRVMVYKFHEDEHGEVVAESKRSDLEPYIGLHYPASDIPQASRFLFKQNRVRMIVDCHASPVRVIQDDGLMQPLCLVGSTLRAPHGCHAQYMENMGSLASLAMAVIINGNEEEAIGGRSPTRLWGLVVCHHTSARCIPFPLRYACEFLMQAFGLQLNMELQLAAQLLEKHVLKTQTLLCDMLLRDSPTGIVTQSPSIMD

SEQ ID NO: 9440 - protein, 374 aa, Quetzalia occidentalis
ALSIAGAVQSQKLAVRAISQLQSLPGGDIKLLCDTVVESVRDPTGYDRVMVYKFHEDEHGEVVAESKRPDLEPYIGLHYPAADIPQASRFLFKQNRVRMIVDCHATPVSVIQDDGLMQPLCLVGSTLRAPHGCHAQYMANMGSMASLAMAVVINGNDEEGIGGRNTTRLWGLVVCHHPSARGIPFPLRYACEFLLQALGLQLNMELQLAAQLSEKHVLRTQTLLCDMLLRDSPTGIVTQNPSIMDLVKCDGAALYYQGKYYPLRVTPTEAQIKGIVEWMLAFHGDSTGLSTDSLADAGYPGAASLGDAVCGMAVAYITNRDFLFWFRSNTAKEIKWGGAKHHPKDKDDGQRMHPRSSFKAFLEVVKSRSLPWEN

SEQ ID NO: 9441 - protein, 369 aa, Ralstonia metallidurans CH34
MGAQTEAFLTEALFQPIKLGRIELANRMAMAPLTRSRADDDLVPTEMVVEYYRQRASVGLIIAEATQVSETAQGYTNTPGVYTPEQIAAWKTVTDAVHAQGGKIFLQIWHTGRMSHSHFQPDNQAPVAPSAIAANAKTYINGQGYVECSLPRALEASEIPEIVNDFRVAAANAIKAGFDGVEVHGAHGYLLDAFLRDGTNKRTDAYGGSIENRARFLLEVMAAVTAEIGADRVGVRLAPVSPVNDAVESNPQPLFEYVVRELEKLHPVYIHVVEGYTGGPRDNVPFDYEALHRLYSGVWMVNNGYSKEMAEEAIRAGRADMVSFGRKMITNPDLPRRFRENQPLNSPFEDASLYGGTGPHGYVDYPALA

SEQ ID NO: 9442 - protein, 374 aa, Quetzalia occidentalis
ALSIAGAVQSQKLAVCSISQLQSLPGGDIKLLCDTVVESVRDLTGYDRVMVYKFHEDEHGEVVAESKRPDLEPYIGLHYPATDIPQASRFLFKQNRVRMIVDCHATPVRVIQDDGLLQPLCLVGSTLRAPHGCHAHYMANMGSMASLAMAVIINVNDEEGIGGRNATRLWGLVVCHHTSTRCIPFPLRYACEFLMQAFGLQLNMELQLALQLSEKHVLRTQTLLCDMLLRDSPTGIVTQSPSTMDLVKCDGAALYHQGKYYPLGVTPTEAQIKDIVEWLLAFHGDSTGLSTDSLADAGYPGAVSLGDAVCGMAVAYITNRDFLFWFRSHTGKEMKWGGAKHHPEDKDDGQRMQPRSSFKAFLEVVKSRSLPWEN

SEQ ID NO: 9443 - protein, 374 aa, Reissantia sp. Chase 2095
ALSIAGAVQSQKLAVRAISQLQSLPGGDIKLLCDTAVESVRNLTGYDRVMVYKFHEDEHGEVVAESRRPDLEPYIGLHYPATDIPQASRFLFKQNRVRIIVDCHASPVSVIQDDGLMQPLCLVGSTLRAPHGCHAQYMENMGSIASLAMAVIINGNDEDGMGGRNPTRLWGLVVCHHTSARCIPFPLRYACEFLMQAFGLQLNMELQLAAQLLEKHVLKTQTLLCDMLLRESPTGIVTQSPSIMDLVKCDGAALYYQANYYPVGVTPTEAQIKDIVEWLLAFHGDSTGLSTDSLADAGYPGATSLGDAACGMAVAYITNRDFLFWFRSHTAKEIKWGGAKHHPEDKDDGQRMHPRSSFKAFLEVVKSRSLPWEN

SEQ ID NO: 9444 - protein, 302 aa, Schizosaccharomyces pombe
MASTTDMSTYKLNHTMIRVKDLDKSLKFYTEVFGMKLIDQWVFEENEFSLSFLAFDGPGALNHGVERSKREGILELTYNFGTEKKEGPVYINGNTEPKRGFGHICFTVDNIESACAYLESKGVSFKKKLSDGKMKHIAFALDPDNYWIELVSQSETKPKANISNFRFNHTMVRVKDPEPSIAFYEKLGMKVIDKADHPNGKFTNYFLAYPSDLPRHDREGLLELTHNWGTEKESGPVYHNGNDGDEKGYGHVCISVDNINAACSKFEAEGLPFKKKLTDGRMKDIAFLLDPDNYWVEVIEQK

SEQ ID NO: 9445 - protein, 425 aa, Thermotoga neapolitana
MKKFPEGFLWGVATASYQIEGSPLADGAGMSIWHTFSHTPGNVKNGDTGDVACDHYNRWKEDIEIIEKIGAKAYRFSISWPRILPEGTGKVNQKGLDFYNRIIDTLLEKNITPFITIYHWDLPFSLQLKGGWANRDIADWFAEYSRVLFENFGDRVKHWITLNEPWVVAIVGHLYGVHAPGMKDIYVAFHTVHNLLRAHAKSVKVFRETVKDGKIGIVFNNGYFEPASEREEDIRAARFMHQFNNYPLFLNPIYRGEYPDLVLEFAREYLPRNYEDDMEEIKQEIDFVGLNYYSGHMVKYDPNSPARVSFVERNLPKTAMGWEIVPEGIYWILKGVKEEYNPQEVYITENGAAFDDVVSEGGKVHDQNRIDYLRAHIEQVWRAIQDGVPLKGYFVWSLLDNFEWAEGYSKRFGIVYVDYNTQKRI

SEQ ID NO: 9446 - protein, 206 aa, Oryza sativa
MASRRRTLLKVIILGDSGVGKTSLMNQYVNKKFSNQYKATIGADFLTKEVQFEDRLFTLQIWDTAGQERFQSLGVAFYRGADCCVLVYDVNSMKSFDNLNNWREEFLIQASPSDPDNFPFVLLGNKVDVDGGNSRVVSEKKAKAWCASKGNIPYFETSAKDGTNVEEAFQCIVKNALKNEPEEELYVPDTVDVVGGNRAQRSSGCC

SEQ ID NO: 9447 - protein, 374 aa, Reissantia indica
ALSIAGAVQSQKLAVRAISQLQSLPGGDIKLLCDTAVESVRNLTGYDRVMVYKFHEDEHGEVVAESRRPDLEPYIGLHYPATDIPQASRFLFKQNRVRIIVDCHASPVSVIQDDGLMQPLCLVGSTLRAPHGCHAQYMENMGSIASLAMAVIINGNDEDRMGGRNPTRLWGLAVCHHTSARCIPFPLRYACEFLMQAFGLQLNMELQLAAQLLEKHVLKTQTLLCDMLLRESPTGIVTQSPSIMDLVKCDGAALYYQANYYPLGVTPTEAQIKDIVEWLLAFHGDSTGLSTDSLADAGYPGATSLGDAVCAMAVAYITNRDFLFWFRSHTAKEIKWGGAKHHPEDKDDGQRMHPRSSFKAFLEVVKSRSLPWEN

SEQ ID NO: 9448 - protein, 157 aa, Carica papaya
MDVRMFVLESPILSSLRQLMELQDTETEKSFNAPTRTYVRDAKAMAATPADAKEYPNSYVFVIDMPGLKSGDIKVQVEDDNVLQISGERKREEEKDGVKYLRMERRIGKFMRKFSLPDNANTDAISAVCQDGVLTVTVQKLPPPEPKKPKTIEVKIA

SEQ ID NO: 9449 - protein, 426 aa, Zea mays
MSTTKVKRRVGKYELGRTIGEGTFAKVRFARDTVTGEAVAIKILDKEKVLRHKMVEQIKREISTMKLIKHPNVVRIYEVMGSKTKIYIVLEFATGGELFDTIVNHGRMREDEARRYFQQLINAVDYCHSRGVYHRDLKPENLLLDSYGNLKVSDFGLSALSQQIKDDGLLHTTCGTPNYVAPEVLEDQGYDGAMADLWSCGVILFVLLAGYLPFEDSNLMTLYKKISNAEFTFPPWTSFPAKRLLTRILDPNPMTRITIPEILEDEWFKKGYKRPEFDEQYDTTLDDVDAVFNDSEEHHVTEKKEEEPVALNAFELISMSAGLNLGNLFDSEQEFKRETRFTSKCPPKEIVRKIEEAAKPLGFDVQKKNYKLRLEKILQVAPSLHMVEVRKAKGDTLEFHKFYKNLSKTLKDVVWKSDDLQTQHAS

SEQ ID NO: 9450 - protein, 480 aa, Thermosynechococcus elongatus BP-1
MSLRLFWHRRDLRLNDNLGLAAAYTRTPKVVGLFCFDPAILSASDIAAVRVAYLVGCLQALQEAYRRLGGSFLIFRGDPRQILPQVAKGLGAVAVHWHEDVEPYGRERDRAVAAALKEKGIAVETAWDQLLHPPEAIQTKQGQPYTVYSPFWRNWSSLAKPEPVSAPRHLEPLTEIEQATAGTLGAICLPTAKDLGFHWSGDLILAPGEAAAQAQLETFIDQHIQDYGEQRNYPAQPGTSLLSPALKFGVIGIRRVWTATQAAMAAARSEEAQRSIRTWQQELAWREFYQHALYWFPHLAERPHREGFATFPWLNNEAHFAAWCEGRTGYPIVDAAMRQLNETGWMHNRCRMIVASFLTKDLIINPQWGERYFMQKLIDGDLAANNGGWQWSASSGMDPKPLRIFNPASQAQKFDPEAEYIRRWLPEVRSLDTIDLVTGNISPLERHRCGYPLPIVDHRQQQQRFKQLYQEHFRSPIPQE

SEQ ID NO: 9451 - protein, 243 aa, Zea mays
MRVAPATRTAAAAHPPSAFLLLLGCASLAIGGAAMAGHVLGGVKENPAAANSAESDGLGRFAVDEHNRRENALLEFVRVVEAKEQVVAGTLHHLTLEAVEAGRKKLYEAKVWVKPWLDFKELQEFSHKGDATAFTNADLGAKEGGHEPGWREVPVEDPVVKDAAHHAVKSIQERSNSLFPYELLEILRAHAQVVEDFAKFDILMKLKRGSKEEKIKAEVHKSLEGAFVLNQHQPAEHAESSSQ

SEQ ID NO: 9452 - protein, 491 aa, Raphanus sativus
MDPYKYRPASSYNSPFFTNSGAPVWNNNSSMTVGPRGPILLEDYHLVEKLANFDRERIPERVVHARGASAKGFFEVTHDISNLTCADFLRAPGVQTPVIVRFSTVIHERGSPETLRDPRGFAVKFYTREGNFDLVGNNFPVFFIRDGMKFPDMVHALKPNPKSHIQENWRVLDFFSHHPESLNMFTFLFDDIGIPQDYRHMEGSGVNTYMLINKSGKAHYVKFHWKPTCGVKSLLEEDAIRVGGTNHSHATQDLYDSIAAGNYPEWKLFVQIIDPADEDKFDFDPLDVTKTWPEDLLPLQPVGRMVLNKNIDNFFAENEQLAFCPAIIVPGIHYSDDKLLQTRVFSYADTQRHRLGPNYLQLPVNAPKCAHHNNHHEGFMNFMHRDEEVNYFPSRYDPVRHAEKYPTPPAVCSGKRERCIIEKENNFKEPGERYRSFTPERQERFIGRWIDALSDPRITHEIRSIWISYWSQADKSLGQKLASRLNVRPSI

SEQ ID NO: 9453 - protein, 285 aa, Pseudomonas fluorescens Pf-5
MAWLTVATPAVGTVVALVLAWHQGIGWLEIGALASMYLLTALGVEVGMHRFFSHHAFKAGPVITAFFGIAGSMAAQGPILFWAATHRQHHAFTDKEGDPHSPRPLKAGFIGNIQGWWHAHLGWLFSLRKQNWSQFVPDLLRDRLIMQINQRYYLWIILGLLLPSLACGLITRSWEGALSGLLWGGFVRIFLVDHATWCINSFAHRVGGRDHKTRDTSRNVFWLAIPTVGGGWHNNHHAFPALAHAGLKPWQLDIGGLFIELLALCGLAWDVKRPGPTVAAEPSES

SEQ ID NO: 9454 - protein, 318 aa, Pseudomonas fluorescens Pf-5
MDEILTNTATPEVGGVAQLSPSAARTKARIALAVMLVPLFGTLEAIRLWFTGQVHALDFILFAVFYAVQMFGVSMGYHRYLAHRAFKTSRLMSSLMLIAGCMAAQGPILFWVTTHRRHHTYSDQHGDPHSPNLMGQSRWQRAKGLWHAHMPWMLAPDMSSWNFFAPDILRDRRLFFYNQTYLFWVALGVILPGVIGGLVSQSWSGAWSGLIFGGLARIFVANQAAWCVGSICHRYGARPFVTHDQSTNNWIVAFLTFGEGLQNNHHAFPAWYRHGVHWWEPDLSGWTLALMGKLRLVSDLRSPSQAMIDKVRKRQASS

SEQ ID NO: 9455 - protein, 310 aa, Yarrowia lipolytica CLIB122
MSLTTSTITLNDGRAMPALGLGTFQNDACEQVVYDAIKAGYRHIDTAFIYRTEEAVGNAVERAISDGIVARSDLWITTKVWPTYHDRVPQSVDKSLALLKTDYIDLLLVHWPVALNGDPNDDYSFLPKREDGEIDITEGDDWISFYKQLETEQKTGRVKSIGVSNVSSVYLERLLEHASVIPAVNQFENHPLLPQKDQIEANLKQGIQITAYSPLGSGQGVINLHENPTIVELAEKYNTSTASILINWHICQGRSVIPKTANSLRVVSNAVKVEISAQDLAKIDAISAEHGTHRTVPFHLFKKDCLGYPV

SEQ ID NO: 9456 - protein, 877 aa, Phaeosphaeria nodorum
MSAAIDNEDLEELSISMPHPRRGGPSTTKAVDFTTPPVAPPTVMQASKSRDSKASQRLGQYTIVKTLGEGSFGKVKLATHQVSGQKVALKIINRKRLVTRDMAGRIEREIQYLQLLRHPHIIKLYTVITTPTEIIMVLEYAGGELFDYIVNNGRLQEDKARKFFQQIVCAVEYCHRHKIVHRDLKPENLLLDDQYNVKIADFGLSNIMTDGNFLKTSCGSPNYAAPEVISGKLYAGPEVDVWSCGVILYVLLVGRLPFDDEYIPTLFKKIAAGNYSIPSYLSPGAVSLIKKMLMVNPVHRITIGEIRMDPWFTKDIAPYLEPPVQEFFDSGVDPHKAIDPTAIAPAIPAPVVQKLHDTVVTKLGKTMGYAEHDVQEALARDEPSAIKDAYLIVRENQMMKVNPLMTQESQLAPFLAQSPPTHHESYLGSSIPQILNSSSPPKGIPSQAQDQHERARHGSNASSQLASVRSPVSTVAILPSSLTEYHKAYMKGHPRPPFKPEHDGLPPTPDQTEEQRQISARRLKPNFRALPDTTRNRPEPMTSLPAKKPRPTKWQFGIRSRNQPAEAMLAIFKALKAMGADWEVPKIRKAGGKGGSRSPTGSHASQERSRSRSRSRSRSPGSSVSSHDSGDEKKTGSDSPTHEPLTVRNADSGEQRGRQRKHYNHTNDWGYHIPEDPWVINARFRKDGMFPPGVAHPSSTHSSRVDLANDPSGLRRRSSTNTSTTSLSHHIDSMTITDRPNSISGEDHPEADEAVYIYVSIQLYSIDREFFVVDFKCAGYERLVSNLVREVKAASSSSPQHQHEDGWDDEAGVWRRLDEGEPLPDDLAKELRDGGKGVLRERTEEVGAGRKEGEKVVTSPFPFLDVASTLILQLSGE

SEQ ID NO: 9457 - protein, 514 aa, Solanum tuberosum
MDGTAVQGTSSVDSFLRNYKLGKTLGIGSFGKVKIAEHTLIGHKVAVKILNRRKIRNMDMEEKVSREIKILRLFMHGHISRLYEVIETPSDIYVVMEYVKSGELFDYIVEKGRLQEDEARNFFQQIISGVEYCHINMVVHRDLKPENLLLDSKWNVKIADFGLSNIMRDGHFLKTSCGSPNYAAPEVISGKLYAGPEVDVWSCGVILYALLCGTLPFDDENIPNLFKKIKGGYITLPSHLSAGARDLIPRMLIVDPMKRMTIPEIRLHPWFQAHLPRYLAVPPPDTMQQAKKIDEEILQEVVKMGFDRNNLTESLRNRVQNEGTVPYYLLLDNRHRVSTGYLGAEFQESMEYGYNRINSNETAASPVGQRFPGIMDYQQAGARQFPIERKWALGLQSRAHPREIMTEVLKALQELNVCWKKIGQYNMKCRWVPSVPGHHEGMGVNSMHGNQFFGDDSSIIENDGDTKLTNVVKFEVQLYKTREEKYLLDLQRIQGPQFLFLDLCAAFLAQLRVL

SEQ ID NO: 9458 - protein, 400 aa, Saccharomyces pastorianus
MSFVKDFKPQALGDTNLFKPIKIGNNELLHRAVIPPLTRMRALHPGNIPNRDWAVEYYTQRAQRPGTMIITEGAFISPQAGGYDNAPGVWSEEQMVEWTKIFNAIHEKKSFVWVQLWVLGWAAFPDNLARDGLRYDSASDNVFMDAEQEAKAKKANNPQHSLTKDEIKQYIKEYVQAAKNSIAAGADGVEIHSANGYLLNQFLDPHSNTRTDEYGGSIENRARFTLEVVDALVEAIGHEKVGLRLSPYGVFNSMSGGAETGIVAQYAYVAGELEKRAKAGKRLAFVHLVEPRVTNPFLTEGEGEYEGGSNDFVYSIWKGPVIRAGNFALHPEVVREEVKDKRTLIGYGRFFISNPDLVDRLEKGLPLNKYDRDTFYQMSAHGYIDYPTYEEALKLGWDKK

SEQ ID NO: 9459 - protein, 484 aa, Listeria innocua Clip11262
MEHNKLKPFPKDFLWGSASAAYQVEGAWDEDGKGPSVWDEFVRIPGTTFKETNGDVAVDNYHRYKEDVALMAEQGLKAYRFSVAWSRVIPHGNGEVNEAGLKFYDNLIDELLSYGIEPVVTLYHWDIPQGLQDEYGGWESRQVIEDFTNYSALLFERFNGRVKYWVTLNEQNVFISHGYKLAYHPPGVSDDKRMFAANHNANLANASAIAKFRELGISGKIGPSFAYGPSYSIDANPANVLASENSEEFNAHFWMDVYTWGEYPTATWNWLEEHGLAPEILPGDTELLKKGKPDFMGVNYYRSMTHAFNGKDGVGSGKMNTTGEKGTSEETGVPGLYKNTNNPYLEKTNWDWDIDPTGLRIGLRRITNRYKLPIMITENGLGEYDSLTEDHKIHDEYRIEYIRAHALAIQEAITDGVEMLGYCTWSFTDLLSWLNGYQKRYGFVYVDRDENDEKELKRYKKDSFYWYKKTIEANGANLVEEQGK

SEQ ID NO: 9460 - protein, 738 aa, Petunia x hybrida
MDCNCFDPQWPADELLMKYQYLSDFFIALAYFSIPVELVYFVQKSAVFPYRWVLVQFGAFIVLCGATHLINLWTSTAHTRTLAIVMTTAKVLTAVVSCATALMLVHIIPDLLSVKTRELFLKNKAAELDREMGLIRTQEETGRYVRMLTHEIRSTLDRHTILKTTLVELGRALGLEECALWMPTRTGLELQLSYTLRHQNPVGFTVPIQLPVINQVFSTNRAVKISPNSPVARLRPAGKYMPGEVVAVRVPLLHLSNFQINDWPELSTKRYALMVLMLPSDSARQWHAHVLELVEVVADQVAVALSHAAILEESMRARDLLMEQNVALDLARREAETAVRARNDFLAVMNHEMRTPMHALIALSSLLQETELTPEQRLMVETILKSSNLLATLINDVLDLSRLEDGSLQLDIGTFNLHALFREVLNLIKPIASVKKLFVTLSLSSDLPEFAIGDEKRIMQVLLNVIGNAVKFSKEGSVSVSAVAAKSESLRDPRAPEFFPVQSENHFYLRVQVKDTGSGISPQDIPKLFNKFAQNQALATKNSGGSGLGLAICKRFVNLMEGHIWIESEGLGKGCTAVFVVKLGIPGRSNESKLPFMPRLPPNHMQMIFQGLKVLVMDDNGFSRMVTKGLLVHLGCDVTTVASGDECLRVLAQEHRVVFMDVSIPGIDCYEVAVRIHEKFNKRHDRPHIVALTANTDRVIKENCMRAGMDGVILKPVSVDKMRSVLSELLEHGVVLQS

SEQ ID NO: 9461 - protein, 245 aa, Rzedowskia tolantonguensis
ALSIAGAVQSQKLAIRAISQLQSLPGGDIKLLCDTVVESVRELTCYDRVMVYKFHEDEHGEVVAESKRPDLEPYIGLHYPATDIPQASRFLFKQNRVRMIVDCHASPVRVIQDDGLMQPLCLVGSTLRAPHGCHAQYMENMGSKASLAMAVIINGNDEEVIGGRNATRLWGLVVCHHTSARCIPFPLRYACEFLMQAFGLQLNMELQLAAQLSEKHVLKTQTLLCDMLLRDSPTGIVTQSPSIMD

SEQ ID NO: 9462 - protein, 738 aa, Petunia x hybrida
MDCNCFDPQWPADELLMKYQYLSDFFIALAYFSIPVELVYFVQKSAVFPYRWVLVQFGAFIVLCGATHLINLWTSTAHTRTLAIVMTTAKVLTAVVSCATALMLVHIIPDLLSVKTRELFLKNKAAELDREMGLIRTQEETGRYVRMLTHEIRSTLDRHTILKTTLVELGRALGLEECALWMPTRTGLELQLSYTLRHQNPVGFTVPIQLPVINQVFSTNRAVKISPNSPVARLRPAGKYMPGEVVAVRVPLLHLSNFQINDWPELSTKRYALMVLMLPSDSARQWHAHELELVEVVADQVAVALSHAAILEESMRARDLLMEQNVALDLARREAEMAVRARNDFLAVMNHEMRTPMHAIIALSSLLQETELTPEQRLMVETILKSSNLLATLINDVLDLSRLEDGSLQLDIGTFNLHALFREVLNLIKPIASVKKLFVTLSLSSDLPEFAIGDEKRIMQVLLNVIGNAVKFSKEGSVSVSAVAAKSESLRDPRAPEFFPVQSENHFYLRVQVKDTGSGISPQDIPKLFNKFAQNQALATNNSGGSGLGLAICKRFANLMEGHIWIESEGLGKGSTAVFVVKLGIPGRSNESKLPFMPRLPPNHMQMTFQGLKVLVMDDNGFSRMVTKGLLVHLGCDVTTVASGDECLRVLAQEQSVVFMDVSIPGIDCYEVAVRIHEKFNKRHDRPLIVALTASTDRVIKENCMRAGMDGVILKPVSVDKMRSVLSELLEHGVVLQS

SEQ ID NO: 9463 - protein, 245 aa, Salacia impressifolia
ALSIAGAVQSQKLAVRAISQIQSLPGGDIKLLCDTVVESVRDLTGYDRVMVYKFHEDEHGEVVAESKRPDLEPYIGLHYPATDIPQASRFLFKQNRVRMVVDCNASPVRVIQNDGLMQPLCLVGSTLRAPHGCHAQYMENMGSIASLAMAVIINGNDEEVIGGRNPTRLWGLVVCHHTSARCIPFPLRYACEFLMQAFGLQLKMELQLAAQLLEKHVLKTQTLLCDMLLRDSPTGIVTQSPSIMD

SEQ ID NO: 9464 - protein, 569 aa, Porphyromonas gingivalis W83
MKKTNLFLSLLVIFITGSFMTACAQKSKTNKLTEEDRSRNEYVQSMDVLSNIIGNVRLYFVDTISIKHMTRRGIDAMLGGLDPYTEYIPYEEMDELKLMTTGEYAGVGAIISQRPDSAVIIQRPMEGMPADEAGLIAGDRILTIDGKDFRKSTTPKVSQALKGIAGTVAKVTVMRYGETKPRTFSVKRQKVIMNSVTYSGMLDGSIGYIRLNNFTDKSAEEVRTALLDLRDKQGAKGLILDLRGNGGGLMQAAIEIVNLFVPKGKEVVTTKGRIAESASVFRTLTEPIDTKLPIVVLIDGQSASSSEIVAGALQDMDRAVLMGQKSYGKGLVQTTRQLPYNGVIKLTTAKYYIPSGRCIQRLDYSRTNRTGMATAIPDSLHKIFYTAAGRRVEDAGGILPDIEVKQDTAATLLYYMAINNDVFDFVTGYVLKHKTIAKPEDFSITNEDYAAFCKMMEEKKFDYDRQSGKMLDKLEELAKIEGYLPEANSELKALREKLKPNLSRDLLRFKKEITNYLNNEIVTRYYYERGSIRQSLPEDKVVKEAIKLLKDHPEQIRQILAAPKAENKG

SEQ ID NO: 9465 - protein, 753 aa, Petunia x hybrida
MGSLLRMNRLLTSIVDSCNCIDPQLPADDLLMKYQYISDFFIALAYFPIPVELIYFVKKSAVFPYRWVLVQFGAFIVLCGATHLINLWTFSMHTRTVAVVMTTAKVLTALVSCITALMLVHIIPDLLSVKTRELFLKKKAAQLDREMGIIRTQEETGRHVRMLTHEIRSTLDRHTILKTTLVELGRTLALEECALWMPTRTGLELQLSYTLRHQNPVGLTVPIQLPVINQVFGTNRAVKISPNAPVARLRPTGKYMPGEVVAVRAPLLHLSNFQINDWPELSTKRYALMVLMLPSDSARQWHVHELELVEVVADQVAVALSHAAILEESMRARDLLMEQNVALDLARREAEMAVRARNDFLAVMNHEMRTPMHAIIALSSLLQETDLTPEQRLMVETILKSSNLLATLINDVLDLSRLEDGSLLLDIGTFNLHALFREVLSLIKPITSVKKLFATLSLSSDLPEYVIGDEKRLMQILLNVVGNAVKFSKEGSVSISAFVAKSESLRDPRAPEFFAVPSENHFYLRVQVKDTGVGINQQDIPNLFSKFAQSEALTTKNSDGSGLGLAICKRFVNLMEGHIWIESDGLGKGCTAIFIIKLGIPGRPNESKLPLMSKLTANELQMTFHGLKVLVMDDNGVSRMVTKGLLAHLGCDVTTVGSRDECLRVVSQEHKVVFMDVSMQGIDCYEVAVLIHERFGKHHGRPLVVELTGNTDSVTKENCMRVGMDGVILKPVSVDKMRSVLSELLEHGVVLQS

SEQ ID NO: 9466 - protein, 245 aa, Salacia impressifolia
ALSIAGAVQSQKLAVRAISQIQSLPGGDIKLLCDTVVESVRDLTGYDRVMVYKFHEDEHGEVVAESKRPDLEPYIGLHYPATDIPQASRFLFKQNRVRMIVDCNASPVRVIQDDGLMQPLCLVGSTLRAPHGCHAQYMENMGSIASLAMAVIINGNDEEVIGGRNPTRLWGLVVCHHTSARCIPFPLRYACEFLMQAFGLQLKMELQLAAQLLEKHVLKTQTLLCDMLLRDSPTGIVTQSPSIMD

SEQ ID NO: 9467 - protein, 205 aa, Aspergillus parasiticus
MSSRKKVLLKVIILGDSGVGKTSLMNQYVNKKFSASYKATIGADFLTKEVLVDDRLVTMQIWDTAGQERFQSLGVAFYRGADCCVLVYDVNNSKSFEALDSWRDEFLIQASPRDPENFPFVVIGNKIDVEESKRMISSKRAMTFCQSKGNIPYFETSAKEAVNVEQAFEVIARSALAQEEAEEFSGEFSDPINIHLDSERDGCAC

SEQ ID NO: 9468 - protein, 361 aa, Salacia nitida
QSQKLAVRAISQIQSLPGGDIKLLCDTVVESVRDLTGYDRVMVYKFHEDEHGEVVAECKRPDLEPYIGLHYPATDIPQASRFLFKQNRVRMIVDCHASPVRVIQDDGLMRPLRLVGSTLRAPHGCHAQYMENMGSIASLAMAVIINGNDEEVIGGRNPTRLWGLVVCHHTSARCIPFPLRYACEFLMQAFGLQLKMELQLAAQLLEKHVLKTQTLLCDMLLRDSPTGIVTQSPSIMDLVKCDGAALYFQGNYYPLGVTPTEAQIKDIVEWLLAFHGDSTGLSTDSSADAGYPGAALLGDAVCGMAVAYITNRDFLFWFRSHTAKEIKWGGAKHHPEDKDDGQRMHPRSSFKAFLEVVKRRS

SEQ ID NO: 9469 - protein, 683 aa, Glomus intraradices
MSPTEMISQENYEPGICKIDPWLKPFAPAIKRRLESYKKWVKEINQNEGGYDKFSRGYERFGLNVLPNGDIIYREWAPNAVAASLIGEFNDWDRSKHPMKKDSFGVWEVHIPAKNGIPTIPHNTKIKISMTTPEGECIDRLPAWIKRVTQDLNVSLAYDAIFWNPPQKYQWKNNSPKKPTSLRIYEAHVGISTNEGRVGTYNEFTDNVLKRIKDLGYNAIQLMAIMEHAYYASFGYQVTSFFGVSSRYGTPEELMRLIDTAHGMGLYVLLDVVHSHACKNVLDGLNMFDGSDHCYFHEGGKGRHDLWDSRLFNYGHWEVLRFLLSNLRFFMEEYRFDGFRFDGVTSMMYHHHGIGTGFSGGYHEYFGDTVDEGGVVYLMLANDMLHKLYPRIITVSEDVSGMPGLCLPVEEGGIGFDYRLAMAIPDMWIKLLKEQRDDDWDMGNICWTLTNRRHMEKTIAYAESHDQALVGDKNTCLLVNGQGMYTHMSDMTPLTPIIDRGLALHKMIRLLTHGLGGEGYLNFEGNEFGHPEWLDFPRAGNNNSFHYARRQWNVVDDDLLRYKYLNEFDKAMQHLEEQYGWLSSPQAYISLKHNENKLVAFERGNLLWIFNFLPTQSFADYKIGTEWAGKYSIALNTDRKIFGGHDRIDESISYHSQPHEWDGRKNYIQVYIPCRVAPVLSHC

SEQ ID NO: 9470 - protein, 387 aa, Debaryomyces hansenii CBS767
MVSDGEFTRTQIFGTVFEITNRYTDLNPVGMGAFGLVCSAIDKLTGQNVAVKKIMKPFLTSVLAKRTYRELKLLKHLRHENLITLDDIFLSPLEDIYFVTELQGTDLHRLLTSRPLEKQFIQYFTYQILRGLKYVHSAGVIHRDLKPSNILINENCDLKICDFGLARIQDPQMTGYVSTRYYRAPEIMLTWQKYDTEVDLWSVGCILSEMIEGKPLFPGKDHVHQFSIITELLGSPPPDVIETICSENTLRFVQSLPHRDPIPFSERFAQCSHVEPEAIDLLAKMLIFDPKKRISALDALSHPYMEPYHDPTDEPVCEVKFDWSFNDADLPVDTWRVMMYSEILDFHQIIGAGANGTTQEQMAQIQQEGIQAPSSQYQQTNQEQKVE

SEQ ID NO: 9471 - protein, 514 aa, Caulobacter crescentus CB15
MSDSRSDDRHPSVTPEQLATLSHEFRTPLNGVLGMARLLENTKLTAEQRSYVTALRESGDHLLSLVNDVLHFARLGAAAIELSLAPVDIEGLLRQVAELMSPRAHEKGIEIAWAVSSPLPTILADEGRLRQILLNFAGNAVKFTEAGGVLLTASAIDGGRVRFSVADTGPGVAPDARARIFEAFVQTDVTHATQLGGAGLGLAIVSRLSAAMGGAVGVGGELGQGAEFWFEAPFATAAAPLRAAPLEGRNVAIASPNAIVRAATARQIEAAGGRAYAAVDIASALAGAPADAVLLIDAALSGPRGALKPPAGRRSVVLLTPEQRDRIDRLKAAGFSGYLIKPLRAASLVAQVLQAVTADGVAEDEPAHDDRIAGAVASGARVLLAEDNPINALLARTLLEREGCIVDRVADGEQAIAAASAGVYDLILMDLRMPGLTGIEAARALRAKGVATPIAALTADAFDEDRRTCLAAGMDDFLVKPLTQEALRDALKRWTTGGVSGGWTKPATRAKVAG

SEQ ID NO: 9472 - protein, 665 aa, Bacillus anthracis str. Sterne
MNKKMEQLKHPVTDNQRKHALTTNQGVKIAEDEFSLKMGLRGPTLMEDFHFREKMTHFDHERIPERIVHARGVGAHGYFQLYESLEAYTKADFLTNPSKKTPVFVRFSTVQGSKGSNDAVRDVRGFATKFYTDEGNYDLVGNNMPVFFIQDAIKFPDFVHAVKPEPHNDIPQGASAHDTFWDFVAHNPESTHMVMWQMSDRAIPRSLRMMEGFGVHTFRLINKEGKAHFVKFHWKPALGVHSLVWDEAQKIAGKNPDFHRQDLYEAIEKGDYPEWELGLQLIPEEDEHTFDFDILDPTKLWPEEEVPVKLVGKMTLNKNVDNFFAETEQVAFHPGHVVPGIDFSNDPLLQGRLFSYTDTQLSRLGGPNFHQTPINQPVCPFHNNQRDGMHQMQIHRGQTSYHPNGLNDNQPATVQAEQGGYEHYQEKIDGHKIRGRSKSFLNFYSQAKLFYNSMSPIEKQHIKEAFCFEVGKCKSDMVKANVIALLNHVDRQLAQEVANIIGAPLPKENHEVNSDAKSPALSMSNTIFKADSKNVAIVLNGDPSVSLLSEWIQAFAQHRINYSIVDNKIYQFNNSIKVTDTYTTTDSSLFDAVLVFSSESAIHPPVLEFAETTFKHFKPIAHVLSNPHALDNSKIKLDGAGIYNLANTSIESFIEGIAQGRFWNR

SEQ ID NO: 9473 - protein, 782 aa, Bradyrhizobium sp. BTAi1
MKIAIIGGGPAGLYAAILLKKQRPSADIAVYERNRPDDTFGFGVVFSDATLDNFEKYDLPSYQRITQEFAYWDDIAVHFRGTVHRVGGNGFCGCSRRTLLMILQERARELGVTLQFEVDIDNEALFAGADLILLSDGINSRFREKHVEHFQPEVDLRANKFAWMGSTKPLDAFTFIFQETEWGPFIAHAYQYEAGHSTWIFETDPATFERAGLTGLDERQSADRMKEIFGWFLGDHPLLINRSMWRNFPMIRNKRWVKDNMVLLGDAKSTAHFSIGSGTKLAMEDAIALADAMARAPSIAAALELYENGRREEVEKIQHAADVSLVWFEHVDRFWDFDPVQFAFGVMTRSKAITYDNLTLRAPDFVAEVDKAFARQVHAKGFDVDVDKPVAPMFQPLKLREMTVVNRAVLSPMCMYSAEEGIPGDFHLVHYGSRAIGGAGLLFTEMTCVSRDARITPGCAGLWNDAQEAAWTRIVDFVHANSQAKFALQLGHAGRKGATKLMWDGMDRPLEQGGWEVVSASPLPYFPDSQVPRELDRASMDAIKADFVAAAERGHACGFDMLELHCAHGYLLASFISPLTNRRTDDYGGSLENRLRFPLEVFAAMRAAWPAHKPMSVRISATDWAEGGITGDDAVLIARAFGEAGVDLVDVSTGQTVREAKPIYGRMFQTPFSDQVRNEAHVATMCVGNITSADQVNTILAAGRADLVALGRPHLVDPAFTMKAAAWYGADMFCPPQYLPGKEQIFRNSVRDRLDFEELKIKAKPKTRAELRAEAAKPLAAE

SEQ ID NO: 9474 - protein, 442 aa, Oryza sativa
  misc_feature (320)..(320): Xaa can be any naturally occurring amino acid
MSSGGGRPPAAQHIVRSVRQRFVPLPPPLARAPFAAAPGDYHRFAAASRGGEIEEGIVIRRTPLKRKTPCGESEAAESSERMMTSPGFTEGVGSPLMTPVSGKTSRTTKSMAKFNKAGPQTPISNAGSPGNPSTPASSRYDNSLGLLTRKFINLLKQTQDGILDLNDAAKILDVRKRRIYDITNVLEGTGLIEKKLKNRIRWRGSDDSGTNLDSDISCLKTEVENLYIQEQALDRSISEIREKMEELTEDESNHRWLFVTEDDIKGLPCFQNEALIAIKGPRGTTVEVPDPDEAGDYLQRRYRILLRSTMGPIDIYLVRXHFILLLKHEAQKKLSDEHPYYIISQYKKMEELGETATPPRHASVVEPPSIATEAGHSSKQTMPLNVQQDIQETPELNASRAFGRMKKITPSDVDTDADYWLLTDDDISITHMWTTACILDEI

SEQ ID NO: 9475 - protein, 369 aa, Halobacterium sp. NRC-1
MQELSPAELGEQVQDDDGPLVLDIRHEEDFQEWHIPGSRNVDVYDELTDDPEQAIEPLDDLPSDEQIVTVCAAGVVSQTATAVLRELGYDAVTLTDGMNGWSRVHRHAELPVDVDGTLVQVARPGKGCLSHVLVSDGEAAVFDPSHYLNEYDTVLDEYDAELVGVFDTHAHADHVSGAADLADRHDVPYYLHQKDALAVDATPLEDGQTVTVGRLDIEVIHTPGHSEGSVSFDVEGAALLTGDTLFHDSVGRVELGVEAGIEDADVEGNAATLYESLQRLLDRPDDALVLPAHDPGSPEPPVAATLAEVRERNDDLGRDREAFVEELASDIPDHPPNFERVKRTNVGQESVPEEELAELELGPNNCAAE

SEQ ID NO: 9476 - protein, 272 aa, Zea mays
SLPCAVTSMELLHAVIHGAATTTTTTTTTTTSSSATVTSGDEGAHLPQGWAKKKRSRRQRSEEENLALCLLMLSRGDRHRVQAPPPPVPSAEFRCSVCGKSFGSYQALGGHKTSHRVKLPTPPAAHVQLPAPPAVALLVEAPAPPPVTATPPPLPLVAVAVAVREPATSSTSDGAAAGRVHRCTICHKEFPTGQALGGHKRKHYDGGAAAAETSEVGSSGNGSSAARAFDLNLPAVPEFAFRCGAKPGKMWDEDQEVQSPLAFKKPRLLMTA

SEQ ID NO: 9477 - protein, 513 aa, Triticum aestivum
HDRTSLYKKAGWYRSGIPGISSTHASAHASGGANSGYWTTNSGAPVWNNNNALTVGQRGPILLEDYHLIEKLAQFDRERIPERVVHARGASAKGFFEVTHDVSQLTCADFLRAPGVQTPVIVRFSTVVHERGSPETLRDPRGFAVKFYTREGNFDLVGNNMPVFFIRDGMKFPDMVHAFKPSPKTNMQENWRIVDFFSHHPESLHMFTFLFDDVGIPLNYRHMDGFGVNTYTLISRDGKAHLVKFHWKPTCGVKCLLDDEAVTVGGTCHTHATKDLTDSIAAGNYPEWKLFIQTIDADHEDKFDFDPLDVTKTWPEDIIPLQPVGRMVLNKNIDNFFAENEQLAFCPAITVPGIHYSDDKLLQTRIFSYADTQRHRLGPNYLMLPVNAPKCAHHNNHHDGLMNFMHRDEEVNYFPSRFDPTRHAEQYPIPPRVLSGCREKCIIEKENNFKQAGERYRSFDPARQDRFLQRWVDALTDARVTHEIQGIWVSYWSQCDTSLGQKLASRLKIKPSM

SEQ ID NO: 9478 - protein, 227 aa, Zymomonas mobilis subsp. mobilis ZM4
MPTTSHSGKMPLEATVIPVTPLRQNCSLLYCVETMKGAIVDPGGDIPLILDSITKKQVTVEKILITHGHFDHCGGAAALSQILGCPIIGPHPDDQFWIDQIPENAQQYGFEGESFTPDQWLKDKDEITLGEERLLVRHCPGHTPGHVVFYNAASHLAIVGDVLFRNSIGRSDFAGGDHQALIQSITEKLWPMGRETVFIPGHGRPSTFGAERDHNPFVADSVLGLMP

SEQ ID NO: 9479 - protein, 545 aa, Shewanella oneidensis MR-1
MAAKEVVFGNDARVKMLAGVNILANAVKVTLGPKGRNVVLDKSFGSPLITKDGVSVAKEIELEDKFENMGAQMVKEVASKANDAAGDGTTTATVLAQAIVTEGLKAVAAGMNPMDLKRGIDKAVIAAVAELKNLSQDCADSKAIAQVGTISANSDESIGQIIATAMEKVGKEGVITVEEGQALENELDVVEGMQFDRGYLSPYFINKPETGSVELDHPFVLLVDKKISNIRELLPILEGLAKTGKPLLIVAEDVEGEALATLVVNNMRGIVKVAAVKAPGFGDRRKAMLQDVAILTGGTVIAEEIGLELEKATLEDLGTAKRVVITKDNTTIIDGNGEQAQIEARVSQIKQQIEESTSDYDKEKLQERMAKLAGGVAVIKVGAATEVEMKEKKARVEDALHATRAAVEEGVVPGGGVALIRVASKIADVEVANEDQKHGVVIALRAMEAPLRQIATNAGEEASVVANNVKNGSGNYGYNAGNDTYGDMLEMGILDPTKVTRSALQFAASIAGLMITTEAMVAELPKADAPDMGGMGGMGGMGGMM

SEQ ID NO: 9480 - protein, 212 aa, Bacteroides fragilis YCH46
MKIKRFEFNMFPVNCYVLWDETNEAVVIDPGCFYDEEKQALKNFIVTNNLNIKHLLNTHLHLDHIFGNPFMLREFGLSAEANQADEYWIDEAPKQSRMFGFQLNEAPVPLGKYLHDGDIITFGNTTLEAIHVPGHSPGSLVYYCRADNCMFSGDVLFQGSIGRADLAGGNFDELKEHICSRLFVLPNETIVYPGHGAPTTIGIEKAENPFFR

SEQ ID NO: 9481 - protein, 1307 aa, Magnaporthe grisea
MADAATLAAVAAIVENIATNSGAPGKNASFRSSTYVQLPGPESDEKKQLERELAALVIRVQQLETRANAAPATIFPDTPNETAHSLFGDDSSSPTSSSSGREPKRLKSASSTTRNGFTTDGRPSKLNAITDEELEGLREHVDGQSRLLDSQRAELDGVNAQLLEQKQLQERALAIIEQERVATLERELWKHQKANEAFQKALREIGSIVTAAARGDLSKRVKINPIEMDPEITTFKRTMNAMMDQLGVFSSEVSRVAREVGTEGILGGQAQIEGVDGTWKELTDNVNVMAQNLTDQVREIASVTTAVAHGDLTQKIESAAKGEILQLQQTINTMVDQLRTFASEVTRVARDVGTEGMLGGQADVEGVKGMWNELTVNVNAMANNLTTQVRDIINVTTAVAKGDLTQKVQAECRGEIFELKNTINSMVDQLQQFAREVTKIAREVGTEGRLGGQATVHDVQGTWRDLTENVNGMAMNLTTQVREIANVTSAVAAGDLSKKIRVEVKGEILDLKNTINTMVDRLGTFAFEVSKVARAVGTDGTLGGQAQVENVEGKWKDLTENVNTMASNLTSQVRGISTVTQAIANGDMSRKIDVEAKGEILILKETINNMVDRLSIFCNEVQRVAKDVGVDGIMGGQADVAGLKGRWKEITTDVNTMANNLTAQVRAFGDITNAATDGDFTKLVEVEASGEMDELKRKINQMVYNLRDSIQRNTQAREAAELANKTKSEFLANMSHEIRTPMNGIIGMTQLTLDTDLTQYQREMLNIVNNLAMSLLTIIDDILDLSKIEAKRMVIEEIPYTLRGTVFNALKTLAVKANDKFLDLTYRVDSSVPDHVIGDSFRLRQIILNLVGNAIKFTEHGEVSLTIQKGNDVTCLPNEYMIEFVVSDTGIGIPTDKLGLIFDTFQQADGSMTRKFGGTGLGLSISKRLVNLMGGDVWVKSQYGKGSSFYFTCRVRLADVDISLIRKQLKPYKGHQVLFIDKGKTGHGPEVGQMLGQLGLVPIVLESEQNHTLTRVRGKECPYDVIVVDSIDTARRLRGIDDFKYLPIVLLAPTVHVSLKSCLDLGITSYMTMPCKLIDLGNGMVPALENRATPSLSDNTKSFEILLAEDNTVNQRLAVKILEKYNHVVTVVSNGAEALEAVKDNKYDVILMDVQMPVMGGFEATAKIREYERSLGTQRTPIIALTAHAMMGDREKCIEAQMDEYLSKPLQQNHLIQTILKCATLGGALLEQNRERELELARHAEHKGGLSTDPARASSVMRPPLHHRPVTTAESLSGGAESPSLMANDGEDPIQRARSSLSEPGCL

SEQ ID NO: 9482 - protein, 472 aa, Spinacia oleracea
MATAVSTVGAATRAPLNLNGSSAGASVPTSGFLGSSLKKHTNVRFPSSSRTTSMTVKAAENEEKNTDKWAHLAKDFSDDQLDIRRGKGMVDSLFQAPADAGTHVPIQSSFEYESQGLRKYDIDNMLGDLYIAPAFMDKLVVHITKNFLNLPNIKIPLILGVWGGKGQGKSFQCELVFAKLGINPIMMSAGELESGNAGEPAKLIRQRYREAADLIAKGKMCALFINDLEPGAGRMGGTTQYTVNNQMVNATLLNIADNPTNVQLPGMYNKQDNARVPIIVTGNDFSTLYAPLIRDGRMEKFYWAPTREDRIGVCTGIFKTDKVPAEHVVKLVDAFPGQSIDFFGALRARVYDDEVRKWVNSVGVDNVGKKLVNSKDGPPVFEQPEMTLQKLMEYGNMLVQEQENVKRVQLADQYMSSAALGDANKDAIDRGTFFGKAAQQVSLPVAQGCTDPEAKNYDPTARSDDGSCTYNL

SEQ ID NO: 9483 - protein, 173 aa, Anabaena variabilis ATCC 29413
MMRTNERLKPGSDSQENLRGVKDMTIIRWNPWQDLNTLQRQLNHLFEEDMLPSTVLERTLTRVPAAEIHETAEAIHLKLELPGIDAKDVDLQVTDKAVYISGERKSETKTEDKGVVKSEFQYGKFQRVIPLPTRIQNTNVKAEYKDGILNLTLPKAEAEKNKVVKVNIESAVG

SEQ ID NO: 9484 - protein, 830 aa, Solanum tuberosum
VLTDDNSTMAPLEEDVKTENIGLLNLDPTLEPYLDHFRHRMKRYVDQKMLIEKYEGPLEEFAQGYLKFGFNREDGCIVYREWAPAAQEAEVIGDFNGWNGSNHMMEKDQFGVWSIRIPDVDSKPVIPHNSRVKFRFKHGNGVWVDRIPAWIKYATADATKFAAPYDGVYWDPPPSERYHFKYPRPPKPRAPRIYEAHVGMSSSEPRVNSYREFADDVLPRIKANNYNTVQLMAIMEHSYYGSFGYHVTNFFAVSSRYGNPEDLKYLIDKAHSLGLQVLVDVVHSHASNNVTDGLNGFDIGQGSQESYFHAGERGYHKLWDSRLFNYANWEVLRFLLSNLRWWLEEYNFDGFRFDGITSMLYVHHGINMGFTGNYNEYFSEATDVDAVVYLMLANNLIHKIFPDATVIAEDVSGMPGLGRPVSEGGIGFDYRLAMAIPDKWIDYLKNKNDEDWSMKEVTSSLTNRRYTEKCIAYAESHDQSIVGDKTIAFLLMDKEMYSGMSCLTDASPVVDRGIALHKMIHFFTMALGGEGYLNFMGNEFGHPEWIDFPREGNNWSYDKCRRQWNLADSEHLRYKFMNAFDRAMNSLDEKFSFLASGKQIVSSMDDDNKVVVFERGDLVFVFNFHPKNTYEGYKVGCDLPGKYRVALDSDAWEFGGHGRTGHDVDHFTSPEGIPGVPETNFNGRPNSFKVLSPARTCVAYYRVDERMSETEDYQTDICSELLPTANIEESDEKLKDSLSTNISNIDERMSETEVYQTDISSELLPTANIEESDEKLKDSLSTNISNIDQTVVVSVEERDKELKDSPSVSIISDVVPAEWDDSDANVWGED

SEQ ID NO: 9485 - protein, 364 aa, Salacia nitida
VQSQKLAVRAISQIQSLPGGDIKLLCDTVVESVRDLTGYDRVMVYKFHEDEHGEVVAECKRPDLEPYIGLHYPATDIPQASRFLFKQNRVRMIVDCHASPVRVIQDDGLMRPLRLVGSTLRAPHGCHAQYMENMGSIASLAMAVIINGNDEEVIGGRNPTRLWGLVVCHHTSARCIPFPLRYACEFLMQAFGLQLKMELQLAAQLLEKHVLKTQTLLCDMLLRDSPTGIVTQSPSIMDLVKCDGAALYFQGNYYPLGVTPTEAQIKDIVEWLLAFHGDSTGLSTDSSADAGYPGAALLGDAVCGMAVAYITNRDFLFWFRSHTAKEIKWGGAKHHPEDKDDGQRMHPRSSFKAFLEVVKRRSLP

SEQ ID NO: 9486 - protein, 238 aa, Lycopersicon esculentum
MADPDTTRTVVGIIGNVISFFLFLSPGPTFVQILKAKSVMEFKPDPYIATVLNCAVWVFYGMPFVHPDSLLVITINGFGLAIELLYVSIFFIYSDWSKRQKIIIALVIEAIFMAILIFVTLTFLHGTKDRSMLIGIVAIVFNIIMYTSPLTVMKKVITTKSVKYMPFYLSLANFANGIVWACYALLKFDPYILIPNGLGSLSGLVQLILFAAFYRTTNWDEDEKEVELSTSKSNKSDV

SEQ ID NO: 9487 - protein, 374 aa, Salaciopsis glomerata
ALSIAGAVQSQKLAVRAISQLQSLPGGDIKLLCDAVVESVRDLTGYDRVMVYKFHEDEHGEVVAESKRSDLEPYIGLHYPATDIPQASRFLFKQNRVRMIADCHASPVRVIQDDGLMQPLCLVGSTLRAPHGCHAQYMENMGSVASLAMAVIVNGNDEEVIGGRNATRLWGLVVCHHASVRCIPFPLRYACEFLMQAFGLQLNMELQLAAQLSEKPVLKTQSLLCDMLLRDSPTGIVTQSPSIMDLVKCDGAALYYQGNYYPLGVTPAEPQIKDIVGWLLAFHGDSKGLSTDSLADAGYPGAALLGDAVCGMAVAYITNRDFLFWFRSHTAKEIKWGGAKHHPEEKDDGQRMHPRSSFKAFLEVVKSRSFPWEN

SEQ ID NO: 9488 - protein, 369 aa, Schaefferia frutescens
ALSIAGAVQSQKLAIRSISQLQSLPGGDIKLLCDTVVESVRELTGYDRVMVYKFHEDEHGEVVAESKRPDLEPYIGLHYPATDIPQASRFLFKQNRVRMIVDCHASPVLVIQDDGLMQPLCLVGSTLRAPHGCHAQYMENMGSKASLAMAVIINGNDEEVTGGRNATRLWGLVVCHHTSARCIPFPLRYACEFLMQAFGLQLNMELQLAAQLSEKHVLKTQTLLCDMLLRDSPTGIVTQSPSIMDLVKCDGAALYYQGKYYPIGVTPAEAQIKDIVEWLLAFHGDSTGLSTDSLADAGYPGATLLGDAVCGMAVAYITNRDFLFWFRSHTTKEIKWGGAKHHPEDKDDGPRMHPRSSFKAFLEVVKSRS

SEQ ID NO: 9489 - protein, 309 aa, Schaefferia frutescens
ALSIAGAVQSQKLAIRSISQLQSLPGGDIKLLCDTVVESVRELTGYDRVMVYKFHEDEHGEVVAESKRPDLEPYIGLHYPATDIPQASRFLFKQNRVRMIVDCHASPVLVIQDDGLMQPLCLVGSTLRAPHGCHAQYMENMGSKASLAMAVIINGNDEEVTGGRNCTRLWGLVVCHHTFARCIPFPLRYAWEFLMQAFGLQLNMELQLAAQLSEKHVLKTQTLLCDMLLRDSPTGIVTQSPSIMDLVKCDGAALYYQGKYYPIGVTPAEAQIKDIVEWLLAFHGDSTGLSTDSLADAGYPGATLLGDAV

SEQ ID NO: 9490 - protein, 150 aa, Zea mays
  misc_feature (32)..(32): Xaa can be any naturally occurring amino acid
CTKYYQQESSKLRQMIHSLQNANTLTCLDGLXRNIVGDSIHTMGLRDLKQMEGKLEKAIIKIRARKNELLYAEVDYMQKREMDLQTDNMYLRSKIAESNETGQPAMHMMGVPPPTSEYDHMAPFDSRNFLQVSMPQHYSHQLQPTTLQLG

SEQ ID NO: 9491 - protein, 488 aa, Listeria innocua Clip11262
MTERKNLTTNQGTPVGDNQNSMTAGLKGPTLLEDYVLIEKLAHFDRERVPERVVHARGAGAHGKFVTKKSMKKYTIANFLQEEGTETEVFARFSTVIHGQHSPETLRDPRGFSVKFYTEEGNYDFVGNNLPVFFIRDAIKFPDVIHSLKPDPRTNIQDGNRYWDFFSLSPEATTMIMYLFSDEGTPASYREIRGSSVHAFKWINEEGKTVYVKLRWVPKAGIVNLSTEQAAQIQAKEFNHASRDLYEAIENGDYPEWDLYVQVLDPKDLDSFDFNPLDATKDWFEDVFPYEHVGTMTLNRNPDNIFAETESVGFNPGVLVRGMLPSEDRLLQGRLFSYSDTQRHRVGPNYLQLPINSPKAPVANNQRDGYMPFKQQTSSINYEPNSYETEPKENPAFIEQEQEIRGDISGRLIAEKPNNFGHAKEVWDRYSDAERAALVKNIVDDWSGVRDDIKIRNLRNFYQIEPEFANRVADGTGINLEEHVADLK

SEQ ID NO: 9492 - protein, 456 aa, Oryza sativa
MARRAREEEADQVERKLVLGRYELGRLLGQGTFAKVYYGRDLRSGESVAIKVIDKARLRRTEGMVEQLRREISIMRMVRHPNVVGIREVLASRARVFVVMEYARGGELFAKVARGRLTEEHARRYFQQLVAAVGFCHGRGVAHRDLKPENLLLDEEGRLKVTDFGLAALPEQLRQDGLLHTQCGTPAYVAPEVLRKRGYDGARADLWSCGVVLYVLLCGFLPFQHENYAKMYQKIFKAEYQVPPWVSGDARRLIVRLLVVDPAKRISIPEIMRTPWFKKGFVPPVPTSPVSPKKWEEDDVLLDGGDSGAMSPRTCNAFQLISSMSSGFDLSGMFESEQKAATVFTSRAPAATVIQKLEAVGRSLGYSATRGKGWKLRLEATADGANGRLAVTVEALEVAADVAVVEFAHDAGDELEFNKFCAVDVRPGLADIVWAWQGDRPAAPDVAAATVECSPA

SEQ ID NO: 9493 - protein, 1233 aa, Neurospora crassa
MDNRTGSRVSVRQPLGDATNRANIAAMQTSSRPKLEANAKSWKNTNRSKSNPPIITDIPLVQHHIVTIPSPVAVPDVPSMSRLRHPSSLQQMNTQASDARRVSQFSNVSSNASITRLQKTHIGPWQLGKTLGKGASARVRLARHRTTHQLVAIKIVAKSTAHVTQATSMANLDRVDYRKPSISTDGVRRMPLAIEREVAILKLIQHPNIIKLHDIWENRQDIYLVTEYVEKGDLFDFINWNGSLNEEEAIFYYRQIMSALEYCHSFNICHRDLKPENILLKADGQIKIADFGMAALHQEPTHHLKTACGSPHYAAPELLKHQPYKGSAVDIWAMGVILFAMLAGRLPFDDSDMDAMLQRARKGYYKMPSELSREAKDLIRKILVVNPLQRITMKQMWKHPLIKKYDYVDDYQQSDGQPQDVLRNADIGPIPEKEVDPQILRQLKAMWHAYSEAQIKEKLGQTKPNDQKVFYWLLYRHRHAQLENYNNDIPISKSDFHHLKPPNWGKRISTCEFTQSSRNGHGRSISKFTVISNVAEVNDSGTVRSYDPYRASQVLRNCASEASHARIIVHRNPSEPGTRSNTSNIAHSYNSYTSFGGSFRRRPRMSSQRTNTTGRLRSSMGSMGSLRSLNGTPRVRANNRSRRGVDFSSIRARDRLQARVRENVRAAPSSAAGSSVVDRRNSCRQQQRQKAAIIHSADNTLKSRDETLIWDEELQQLGYRIAMDCDEAFRSSLVGSETSVAVSGSRENSPFSLSLGASSPSPQPESPTALPLQQQAVNHSWVNRPLPPIPSIEISPVVNQTYGVNVVRPAPLRIERLSLGNCASASQTLVPDRRIVSEPVYTTPANRDPRQLPSINETASEDWTRNASTRWASPDTPSPAENNKALNYLARAENTIRVVNSPTAGPVPMPEPLNVRKVSKATPAASGESNYRKTALSNIPPDFKENCPPGTQQEEQGVGDNTVNAGAPAKKRVPSWFRRSSKDNTSFATTANTAAIHNDSTIISDIHQQLDGLESQSSARPDPYPNKKKAFSLAFWKGSKSENSSPTASTFDISTSKEGGGKKHKSSKSESRVVSGATSQSWGEGEGVGRQIEVQQNWLARLFRVKPATRHLCFSMPRRRARQEVAILLREWRQFGIKDVEVDKERNIIFARVGAQNVHNVKEVSFAIEIMMVIEHGKRNQRTQLSIARFTQEKGAASSFHKVVDAINVEFRNRGLLVTDKRKTQMMIKTLNS

SEQ ID NO: 9494 - protein, 637 aa, Cucumis melo
MMESCDCIDAQWPPDELLVKYQYISDVLIALAYFSIPLELIYFVQKSAFFPYRWVLMQFGAFIVLCGATHFINLWTFSMHSKAVAVVMTVAKVACAIVSCATALMLVHIIPDLLSVKTRELILKNKAEQLDREMGLILTQEETGRHVRMLTHEIRSTLDRDTILKTTLVELGKTLGLEECALWMPSRNGLSLQLSHALNYQIPVGTNIPINLPVVNDVFNSNRAICVPYTCQLARVRTPVGGRYLPPEVVAVRVPLLNLSNFQMNNWPDGSSRSYAIMVLILPTDSARKWRDHELELVDVVADQVAVALSHAAILEESMRARDQLVDQNVALDLARREAETAIHARNDFLAVMNHEMRTPMHAIIALSSLLLETELTPEQRVMIETILKSSNLLATLINDVLDLSRLEDGSLVLDMGSFNLHAIFKEALDLIKPIASVKKLSMALILASDLPICAVGDEKRLMQIILNIVGNGVKFTKEGHVSIIASIAKLDSLRDWRPTEFYPMQSDGQFYLRVQVKDSGCGIPPQDIPHLFTRFTQLQTRSNKTNSGVGLGLALCKRFINLMGGHIWIESEGPDKGTTAMFIVKLGICNANPNDLSVKQVAPIVNHRSADLHGQRPIFRETGQVAFSNSRYQRSL

SEQ ID NO: 9495 - protein, 363 aa, Simicratea welwitschii
QSQKLAVRAISQLQSLPGGDIKLLCDTAVESVRDLTGYDRVMVYRFHEDEHGEVVAESKRPDLEPYIGLHYPATDIPQASRFLFKQNRVRIIVDCHASPVSVIQDDGLMQPLCLVGSTLRAPHGCHAQYMENMGSIASLAMAVIINGNDEEGMGGRNPTRLWGLVVCHHTSSRCIPFPLRYACEFLMQAFGLQLNMELQLAAQLLEKHVLKTQTLLCDMLLRESPTGIVTQSPSIMDLVKCDGAALYYQANYYPLGVTPTEAQIRDIVEWLLACHGDSTGLSTDSLADAGYPGATLLGDAVCGMAVAYITNRDFLFWFRSHTAKEIKWGGAKHHPEDKDDGQRMHPRSSFKAFLEVVKSRSLP

SEQ ID NO: 9496 - protein, 476 aa, Arabidopsis thaliana
  misc_feature (103)..(103): Xaa can be any naturally occurring amino acid
  misc_feature (120)..(120): Xaa can be any naturally occurring amino acid
  misc_feature (186)..(186): Xaa can be any naturally occurring amino acid
MAAAVSTVGAINRAPLSLNGSGSGAVSAPASTFLGKKVVTVSRFAQSNKKSNGSFKVLAVKEDKQTDGDRWRGLAYDTSDDQQDITRGKGMVDSVFQAPMGTXGTHHAVLSSYEYVSQGXLRQYNLDNMMDGFYIAPAFMDKLVVHITKNFLTLPNIKVPLILGSRGGKGQGKSFQCELVMAKMGXINPIMMSAGELESGNAGEVRKLIRQRYREAADLIKKGKMCCLFINDLDAGAGRMGGTTQYTVNNQMVNATLMNIADNPTNVQLPGMYNKEENARVPIICTGNDFSTLYGPLILDGRMEKFLTGPTREDRIGVWGIFRTDKIKDEDIVTLVDQFPGQSIDFFGALRARVYDDEVRKFVESLGVEKIGKRLVNSREGPPVFEQPEMTYEKLMEYGNMLVMEQENVKRVQLAETYLSQAALGDANADAIGRGTFYGKGAHEVNLPVPEGCTDPVAENFDPTARSDDGTCVYNF

SEQ ID NO: 9497 - protein, 133 aa, Zea mays
HASGIVSLVAALLILLALAVSSTRNAQEDSMADNTGTLAGGIKDVPGNENDLHLQELARFAVDEHNKKANALLGFEKLVKAKTQVVAGTMYYLTIEVKDGEVKKLYEAKVWEKPWENFKELQEFKPVEEGASA

SEQ ID NO: 9498 - protein, 135 aa, Zea mays
MRVHRIVSLLAALLVLLALAAVSSTRSAQEESVADNAGMLAGGIKDVPANENDLQLQELARFAVNEHNKKANALLGFEKLVKAKTQVVAGTMYYLTIEAKDGEVKKLYEAKVWEKPWENFKQLQEFKPVEEGASA

SEQ ID NO: 9499 - protein, 628 aa, Rumex palustris
MNTCDCVDTQWFADDLLIKSQYISDLFIVLAYFSIPLELIYFVQKSALFPYRWVLIQFGAFIVLCGTTHLINLFTFSMHSKTLAVVMAIAKMSTAAVSCITALMLVHIIPDLLSVKMRESILRRRADELDREMGLILSQEETGRHVRMLTHEIRSTLDRHTILKTTLVELGRTLGLEECSLWMPSQTGMTLKLSHALQNLTPVGSCVSLNLPVITEIFNNPGVVRISHTCPLVSTRPISGRYLAPEVAAIRVPLLNLSNFQINDWPDVSGRTYAVMVLVLPCDGLRKFRKHELELIEVVADQVAVALSHAAILEESMRAHDQLLEKNVALDLARQEAELAIRARNDFLAVMNHEMRSAMHAIITLSSFLLETELTPEQRVMIEIILRSSNILATLINDVLDLSRLEDGSLELDSLTFNLHAVFKKVINLLKPITCVKKLSLTLAVAPEAICVVGDEKRLVQTILNVVGNAVKFTKVGKISIIVSVAKPDSLSSWQPADVIYAAVSKGQFYLRVQVKDTGCGINPQEIPHIFDKFYQSQNCRRNSTDSGLGLAICKRFVNLMGGQIWVESEGLDKGSLVTFVVKMGICRNPDERSINQAASTGHMNQSSTDLLGDSSMSFSLKRFEKSC

SEQ ID NO: 9500 - protein, 364 aa, Burkholderia sp. 383
MERSSSSSSPQREPGRGWWRWAAIGGAVAGVAVAFGYVGGWLAPARLTPHRIVDALQTAGGGIHPGFRRNHAKGVCVTGYFEGNGAASMYSVAPFFKAVRTPVVGRFALPGGNPYAPDSSVPIRSLALRLTAPDGEQWRTGMNAMPVFPVATPQAFYAQLMATRPDPKTGKPDPAKVKAFFGSHPETAAFLQWIKGAKPSASYVTESYYGLNAFYFVDAAGKRQAVRWRVVPEQSAGAGDVATAADPNVLQQDVTQRIAAGPQKWKLLVTLAEPGDPVDDATKVWPAQRTTIDAGTLVLDRVEAQDSGPCRDVNYDPTVLPQGIQVSGDPLLPARSAAYADSYLRRTSEEAGVAGVARLSGEGR

SEQ ID NO: 9501 - protein, 365 aa, Salmonella enterica subsp. enterica serovar Paratyphi A str.
MSSAKLFTPLKVGAITATNRVFMAPLTRLRSIEPGDIPTPLMAEYYRQRASAGLIISEATQISAQAKGYAGAPGLHSDEQIAAWKKITQGVHTQGGHMAVQLWHTGRISHASLQPGGQAPVAPSAINAGTRTSLRDENGQAIRVETSTPRALDTHEIPGIVNDFRQAIANAREAGFDLVELHSAHGYLLHQFLSPSSNHRTDQYGGSVENRARLVLEVVDAGIKEWGADRIGIRLSPVGTFQNVDNGPNEEADALYLIEALGKRGIAYLHMSEPDWAGGEPYSDAFREKVRARFHGPIIGAGAYTPEKAEDLIEKGLIDAVAFGRDYIANPDLVARLQRKAELNPQRPESFYGGGAEGYTDYPTL

SEQ ID NO: 9502 - protein, 171 aa, Medicago sativa
MKIHHISCLEDNYSYLIVDETTKEAAAVDPVEPEKVLEASNSLGLTIKFVLTTHHHWDHAGGNEKIKQLVPGIKVYGGSIDNVKGCTDALENGDKVHLGADINILALHTPCHTKGHISYYVTGKEDEDPAVFTGDTLFIAGCGKFFEGTAEQMYQSLSVTLGSLPKPTRVY

SEQ ID NO: 9503 - protein, 517 aa, Oryza sativa
  misc_feature (433)..(433): Xaa can be any naturally occurring amino acid
MAMAAMDARKKKSGGGGGEPLLGKYELGRMLGRGTFAKVYLARAVAGGEAVAVKVIDKAEVMGTAGMAPRVLREVAAMRRLRHPHVLRLHEVLATRARIYLVMELATGGDLLSRLAALPRRRLPESAARRVFVQLVDALSYCHARGVAHRDVKPQNVLLDGDGNLKVSDFGLAALPDTLRDDGRLHTACGTPAYAAPEVLRRRAYDGAKADAWSCGVILFVLLAGHLPFDDSNIADMCRKAHRREYELPRWVSQPARRLVSRLLDPNPDTRVAVESLAAHHPWFKRSLSVDSQLDGLLNGEPERAVAFQAAPPPPLNAFDIISMSPGLDLSGLFGEHDKSLREKRFTTTASPEKTLEQFGLAGGKLGYVVVVGKKGVECLPLAGGRLSSGIAAMSVEMSEVAPPLLLVELRLEVAAGDVDGGDGEVKGFGWDXLRMELGDSPLLLVDLRLEVTVDVDGNGGEVQGFGWEQLRMELGDNCLRCCCRSRHLLAHQLRIQLLSAAYHLRQQWRRQLQTWR

SEQ ID NO: 9504 - protein, 402 aa, Shewanella oneidensis MR-1
MKHLLRNIASLGLGLSLGLSISLSSQENTKSYRSDFDYPLLQDVLETVETYYVKTVTKDELVQAAIKGIFEHLDPYSSFLNHQELLDLKDSNRGEYFGFGFEVASEKDHISIIAPFANSPAEQAGIQAGDIIIKLNNTPTTETNLADILNQIKQHSLSHQSIRLTLKHRNDEAEFEVMLKPSTITIQSVASKLLDGNIGYVRLSSFQEDSTEDMVRTLSQWQGTQLTGLILDLRNNPGGLLDQAINIADLFLAKGRIVSTSGRFFDANSDYYASPQTMLANVPMLVLINKGSASASEVLAAALQENGRAKLLGETSFGKGTVQSLIPILNNGNAVKLTIAQYNTPKGENIHDIGIKPDIKVVSETGSNQKNMPIIDAISARTDVSQDTIVTSAITWMQHHDE

SEQ ID NO: 9505 - protein, 173 aa, Glycine max
MSDAPPSPTHESGGEQSPRGSSSGAREQDRYLPIANISRIMKKALPPNGKIAKDAKDTMQECVSEFISFITSEASEKCQKEKRKTINGDDLLWAMATLGFEDYIEPLKVYLARYREAEGDTKGSARSGDGSATPDQVGLAGQNSQLVHQGSLNYIGLQVQPQHLVMPSMQSHE

SEQ ID NO: 9506 - protein, 482 aa, Corynebacterium glutamicum ATCC 13032
MNANARVFILNSLAMNDPQRSPTLLWFRDDLRLSDNAALKWAADHGPVIGLFIDETINRSIGAAARWWREQSLNALAQDLSFYGVPLLRRTGNPLEILPKIVSEMEVKAVTWNRRYHQPLCEVDATLKKNLRDKGIEVHSHPGFLLTEPWEVSTATGTPYKVFTPFSKAAWEVARVHAYETVKNNVPVPSHLTGPEDVELPILEMEQPFWSTTLVKECAPGEKNASEKLFDFLEHLQDYPQARDSLARSATSKLSAHLRFGEISIHRVWAETAAIDSEGTELFLKELLWRDFAWHRLYALPHMDTQNVRMQFNRFGWSWDPSEKDKLNTPSTPLIPTKADQFHEDLAAWRAGKTGIPLVDAGMRELWATGSMHNRVRMVVASFLTKNLQIHWRHGEEWFWETLVDADPASNAFNWQWAAGSGDDASPYFRIFNPVTQAKKFDPDETYIRRWVPEYGTPSYPDPIVDLKESRQIALDAYSAIK

SEQ ID NO: 9507 - protein, 151 aa, Picea abies
MAMDPLLSTVQQLLGVPDDLERILHAPTRSYMRDTEATASTPVDVKEYPNSYVFIVDMPGLKSNDIKVQVEDENVLNISGERKRNEKEEGEVKYIRMERRVAKFMRKFSLPADCNLEAISAACQDGVLTVTVPKLPPPEPKKPKTIAVKIG

SEQ ID NO: 9508 - protein, 587 aa, Triticum aestivum
  misc_feature (303)..(303): Xaa can be any naturally occurring amino acid
  misc_feature (339)..(339): Xaa can be any naturally occurring amino acid
  misc_feature (362)..(362): Xaa can be any naturally occurring amino acid
  misc_feature (404)..(404): Xaa can be any naturally occurring amino acid
  misc_feature (409)..(409): Xaa can be any naturally occurring amino acid
  misc_feature (417)..(417): Xaa can be any naturally occurring amino acid
  misc_feature (436)..(436): Xaa can be any naturally occurring amino acid
  misc_feature (463)..(463): Xaa can be any naturally occurring amino acid
  misc_feature (473)..(473): Xaa can be any naturally occurring amino acid
MCGILAVLGVGDVSLAKRSRIIELSRRLRHRGPDWSGIHSFEDCYLAHQRLAIVDPTSGDQPLYNEDKTVVVTVNGEIYNHEELKAKLKSHQFQTGSDCEVIAHLYEEYGEEFVDMLDGMFSFVLLDTRDKSFIAARDAIGICPLYMGWGLDGSVWFSSEMKALSDDCERFISFPPGHLYSSKTGGLRRWYNPPWFSESIPSAPYDPLLIRESFEKAVIKRLMTDVPFGVLLSGGLDSSLVASVVSRYLAETKVARQWGNKLHTFCIGLKGSPDLKAAKEVADYLGTVHHEIHFTVQEGIDAXEEVLYHIQTYDVTTIRASPPIVSNVSGKINSWGVKXMVFSGEGSDEIFGGYLYFHKAPXQKELHEETCRKDKALPLYDCLRANKSTSAWGLEACVPFLDKXFIHVXMGLDPECXMIGVILVDRKWVRVCIYNXKSPFFQAIFKAKRNSSPNGVGYSWIMXGHANALVSNXMTNASFVYPENTPTTKEAYYYRTVFEKFYPKNAARLTVPGGPSVACSTAKAVEWDAAWSKLLDPSGRAALGVHDAAYEEEKAPASVDPVLENAFHPPAHGESTLVKSAVPAAAV

SEQ ID NO: 9509 - protein, 193 aa, Triticum aestivum
HSITSLYKKAGWYRSGIPGISSTHASGVCVLSGAGTVTNLTLRQPASQGAVVALHGRFEILSLSGSFLPPPAPPEATGLTVYLAGGKGQVVGGTVVGSLTAAGPVVIMAASFANAVYERLPLEEDELLAAQGQADSAGMLAAGQQASQMAGGDVDPSLFEGLPPNLLGNVQLPPEAASYRWNPGTAGGRPSPF

SEQ ID NO: 9510 - protein, 355 aa, Brassica napus
MAAQGNSTDTLFSPYKMGRFDLSHRVVLAPMTRCRALNGVPNAALAEYYAQRTTPGGFLISEGTMISPGSAGFPHVPGIYSEEQVEAWKHVVEAVHSKGGLIFCQLWHVGRASHPLYQPNGGSPISSTDKPISERWRVLLPDGSHAKYPKPRPLHASEIPRVVEDYCNSAVNAIRAGFDGIEIHGAHGYLIDQFMKNGINDRTDQYGGSIENRCRFLLQVVKGVVSAIGASKVGVRISPAIDHLDATDSDPLSLGLAVVDLLNKLQDDTGSKLAYLHVTQPRYHAYGQTESGRQGSDEEEAKLMKSLRTAYNGTFMSSGGFNKELGMQAIRQGDADLVSFGRLFIANPDLVSRFK

SEQ ID NO: 9511 - protein, 363 aa, Simicratea welwitschii
QSQKLAVRAISQLQSLPGGDIKLLCDTAVESVRDLTGYDRVMVYRFHEDEHGEVVAESKRPDLEPYIGLHYPATDIPQASRFLFKQNRVRIIVDCHASPVSVIQDDGLMQPLCLVGSTLRAPHGCHAQYMENMGSIASLAMAVIINGNDEEGMGGRNPTRLWGLVVCHHTSSRCIPFPLRYACEFLMQAFGLQLNMELQLAAQLLEKHVLKTQTLLCDMLLRESPTGIVTQRPSIMDLVKCDGAALYYQANYYPLGVTPTEAQIRDIVEWVLACHGDSTGLSTDSLADAGYPGATLLGDAVCGMAVAYITNRDFLFWFRSHTAKEIKWGGAKHHPEDKDDGQRMHPRSSFKAFLEVVKSRSLP

SEQ ID NO: 9512 - protein, 479 aa, Bacillus halodurans C-125
MVVVIAAIVGAVAYLSNFGLAGDNVSSPQEETASSESSPPATLSDEEAFAKFQQAFQLIQDRYVDEVDEEKLLQGAIEGMLGTLDDPYSVYMDPETAAEFVQSLDSHFEGIGAEVSMTNGYVTIVAPFRESPAEKAGLQPNDRILEIDGESTEGLSLYEAVLKIRGEKGTTVDLTIERPGASNVVNITVERDEIPIETVHVHRFERNGLTIGMLEITSFSEDTADRFEEGLAQLEGEGIDGLIIDVRGNPGGYLNAVEDIGSLIIPEGEPIVQIQNRDGEKMRYLSTLKEEKPYPIVGLTDRGSASASEILAAALKEAGHYDVVGETTFGKGTVQQSIELGDGSEIKLSLFRWLTSDGNDINGVGVEPTVEVLQPDYFYTAPLSVEEPLELDMLNDQIEHAQMMLKGLGFEPGRTDGYFEEQTEKAVRAFQDSQELETTGVLDEETAIALQQSIVDLVRDQENDQQLRVALDLIVEQAQ

SEQ ID NO: 9513 - protein, 85 aa, Malus x domestica
NFDLVGNNFPVFFIRDGIKFPDMVHALKPNPKSHIQEFWRILDFFSHHPESLHMFTFLFDDIGVPQDYRHMDGSGVNTYTLIDKA

SEQ ID NO: 9514 - protein, 173 aa, Bradyrhizobium sp. BTAi1
MAEPTKLPVNTDKATAPSVQGWRPFESLRREIDRVFEDFHSGIWRTPSLFDQLPSLPRTRSFAVAPAVDVAEHDNAYEVSAELPGLDEKNVEVKVTNGVLSIRGEKQEDKEEKKKDYYVRERSFGSFERSFQIPDGVDTDKIEAVFRQGVLKVTLPKKPEVQKAAKTIDIKAA

SEQ ID NO: 9515 - protein, 381 aa, Parachlamydia sp. UWE25
MKIKEFNWGPTLFLTIYQTLLLLSLPFYFYFTPPSLGMIGISIILLYLTGLSITAGYHRFYSHRSYRTNSFVEMLLLFFGSMAGQGSALRWSFDHRLHHAHVDTDCDPYSIKKGFWYAHCLWILEKPKKIEAKVVPDLIKNRLVQFQHKYDFLCMLISNGIAFLVVGWFLDDYMGAFFLACWTRLFLLHHFTWFINSLAHTWGDRPFCQEQSAVNNYILALLTFGEGYHNYHHTFCNDYRNGIRWFHFDPTKWLIWTLSKCGLTKELKRMDSYTIQKRMVLERKRLLLGRVCNLWYVKKDELEKLVRELAEKLVVEFAEFNQLRVNYRLARKEGREPDQLKVFKQKLSILKKNLKSNWRLWKQLSRHILKLKPFESFPCPI

SEQ ID NO: 9516 - protein, 245 aa, Siphonodon australis
ALSIAGAVQSQKLAVRAISQLQSLAGGDIKLLCDTVVESVRDLIGYDRVMVYKFHEDEHGEVLAESKRPDLEPYIGLHYPATDIPQASRFLFKQNRVRMIVDCHASPVRVIQDDGLMQPLCLVGSTLRAPHGCHAQYMENMGSTASLVMAAMINGNDEKATGGRNTTKLWGLVVCHHTSARCIPFPLRYACEFLMQAFGLQLNMELQLAAQLSEKHVLKTQTLLCDMLLRDSPTGIVTQSPSIMD

SEQ ID NO: 9517 - protein, 556 aa, Arabidopsis thaliana
MQRFCVCSPSSYRLNPITSMATGSGSLIWFRKGLRVHDNPALEYASKGSEFMYPVFVIDPHYMESDPSAFSPGSSRAGVNRIRFLLESLKDLDSSLKKLGSRLLVFKGEPGEVLVRCLQEWKVKRLCFEYDTDPYYQALDVKVKDYASSTGVEVFSPVSHTLFNPAHIIEKNGGKPPLSYQSFLKVAGEPSCAKSELVMSYSSLPPIGDIGNLGISEVPSLEELGYKDDEQADWTPFRGGESEALKRLTKSISDKAWVANFEKPKGDPSAFLKPATTVMSPYLKFGCLSSRYFYQCLQNIYKDVKKHTSPPVSLLGQLLWREFFYTTAFGTPNFDKMKGNRICKQIPWNEDHAMLAAWRDGKTGYPWIDAIMVQLLKWGWMHHLARHCVACFLTRGDLFIHWEQGRDVFERLLIDSDWAINNGNWMWLSCSSFFYQFNRIYSPISFGKKYDPDGKYIRHFLPVLKDMPKQYIYEPWTAPLSVQTKANCIVGKDYPKPMVLHDSASKECKRKMGEAYALNKKMDGKVDEENLRDLRRKLQKDEHEESKIRNQRPKLK

SEQ ID NO: 9518 - protein, 374 aa, Siphonodon celastrineus
ALSIAGAVQSQKLAVRAISQLQSLAGGDIKLLCDTVVESVRDLTGHDRVMVYKFHEDEHGEVLAESKRPDMEPYIGLHYPATDIPQASRFLFKQNRVRMIVDCHASPVRVIQDDGLMRPLCLVGSTLRAPHGCHAQYMENMGSTTSLVMAAYINGNDEKATGGRNATKLWGLAVCHHTSARCIPFPLRYACEFLMQAFGLQLNMELQLAAQLSEKHVLKTQTLLCDMLLRDSPTGIVTQSPSIMDLVRCDGAALYYQGNYYPLGVTPTEAQIKDIVEWLLAVHGDSMGLSTDCLADAGYPGSALLGDAVCGMAVAHITNRDFLLWFRSHTAEEIKWGGAKHRPKDKDDGQRMHPRSSFKAFLEVVKSRSLPWEN

SEQ ID NO: 9519 - protein, 154 aa, Coursetia madrensis
RVMAYKFHEDDHGEVIAEITKPGLEPYLGLHYPATDIPQAARFLFLKNKVRMIVDCHAKHVKVLQDEKLPIDLSLCGSTLRAPHSCHLQYMANMDSIASLVMAVVVNDSDEDGDSSDAVQPQKRKRLWGLVVCHNTTPRFVPFPLRYACEFLAQ

SEQ ID NO: 9520 - protein, 475 aa, Zea mays
  misc_feature (248)..(248): Xaa can be any naturally occurring amino acid
  misc_feature (254)..(254): Xaa can be any naturally occurring amino acid
  misc_feature (310)..(310): Xaa can be any naturally occurring amino acid
MGKRSGGRKLPFFTRSSSSSSKRNRSGRRLPSPSKQDNATRALLASPTAASPSATPDSAAAGQTAQPPSPLSVTAGAGGALSGKITKKKPGARLWMRLDRWGASEVVELDKATIIRRAGLPSRDLRILGPVFSRSSSILAREKTMVINLEFIRAIVTAEEVLLLDPLMHEVLPFVDQLRQHLPLRSLVGGNGECAPDGNGEKQGGSHGGQVPRLNEATGAEHEFPFEFHVLEVALEIVCSSLDLAVMXERHATXVLDELTKNVSTRNLERVRSLKSHLTRLLARVQKVRDEIEHLLDDNEDMEHLYLTRXQVHNQQDEAVMSSADSNSIGLAGPGVPRLNSSVRRSLSVATSMHLHNDVEDLKMLLEAYFMHLDGIRNRILSVRQYIDDTEDYFNIQLDNQRNELIQLQLTLTIASFGIAANTFIVGAFAMNIPSSLYNTDNTLFWPFVGGTSSGCFVITILLFGYAWWKKLLGP

SEQ ID NO: 9521 - protein, 374 aa, Siphonodon celastrineus
ALSIAGAVQSQKLAVRAISQLQSLAGGDIKLLCDTVVESVRDLTGHDRVMVYKFHEDEHGEVLAESKRPDMEPYIGLHYPATDIPQASRFLFKQNRVRMIVDCHASPVRVIQDDGLMRPLCLVGSTLRAPHGCHAQYMENMGSTASLVMAAYINGNDKKATGGRNATKLWGLAVCHHTSARCIPFPFRYACEFLMQAFGLQLNMELQLAAQLSEKHVLKTQTLLCDMLLRDSPTGIVTQSPSIMDLVRCDGAALYYQGNYYPLGVTPTEAQIKDIVEWLLAVHGDSMGLSTDCLADAGYPGSALLGDAVCGMAVAHITNRDFLLWFRSHTAEEIKWGGAKHRPKDKDDGQRMHPRSSFKAFLEVVKSRSLPWEN

SEQ ID NO: 9522 - protein, 323 aa, Arabidopsis thaliana
  misc_feature (236)..(236): Xaa can be any naturally occurring amino acid
  misc_feature (280)..(280): Xaa can be any naturally occurring amino acid
  misc_feature (286)..(286): Xaa can be any naturally occurring amino acid
  misc_feature (293)..(293): Xaa can be any naturally occurring amino acid
MVMIEGPVLLEDYHLIEKVANFTRERIPERVVHARGISAKGFFEVTHDISNLTCADFLRAPGVQTPVIVRFSTVVHERASPETMRDIRGFAVKFYTREGNFDLVGNNTPVFFIRDGIQFPDVVHALKPNPKTNIQEYWRILDYMSHLPESLLTWCWMFDDVGIPQDYRHMEGFGVHTYTLIAKSGKVLFVKFHWKPTCGIKNLTDEEAKVVGGANHSHATKDLHDAIASGNYPEWXKLFIQTMDPADEGKFDFDPLDVTKIWPEDILPLQPVGRLVLNRXIDNFFXMKTEQLXFNPGLVGSLGILLPQDGKACSNCRVLFAYW

SEQ ID NO: 9523 - protein, 357 aa, Burkholderia sp. 383
MSQLFTPVRVGRYTLENRLVMAPMTRSRAAFDGTPGEWAAEYYAQRSSLGLIVSEGTQPSDDGQGYLTTPGIYTDAHVAGWKAISDRVHARGGRLFIQLMHVGRMSHPDNTPHHRQAVAPSAIAPNAPMFTMKGMLDIPAPRALTLDEVRETVNDFRIAARRAIEAGADGVEIHGANGYLIQQFFAPNANTRTDAYGGSIDNRARFAIEVATAIADEIGADRTALRVSPGNTLGGLDEGTEGPDLYRHLATELDRLGLAYLHVMHQGDEALLADLRSRWNGTLILNRPGRARDAIGDDLKSGLADLEAYGQMVLANPDFVTRVKTGAPMNDARRETFFGGDARGYVDYPALGGVAAA

SEQ ID NO: 9524 - protein, 646 aa, Mesorhizobium sp. BNC1
MCGFGGYFGAGVSEAEPLLRRMASAIAHRGPDERGTAVLDGAGLCHTRLSIVGLADGQQPMSLDGGRLTIAFNGEIFNYVELREALIARGRTFRTASDTEVILHLYDEKGPDCLADLNGDFAFAIWDAPRRRMFLARDRMGVRPLFYTSVGDRLFFASEVKTLLQVPGVEAEMDPFALDQMFTLWAPIAPRTAFKNIHELEPGHMMLVEEGRQAIRPYWSLSFPEHGAPSRHTDERAVAEELRALLTDATRLRMRADVPVGSYLSGGLDSSVISALAAGMTPEILRTFSVAFESAEHDESAFQNEVAAALGTMHASVNCGDGDIAAVFPDVIRFTERPILRTAPAPLFKLSALVRERGLKVVLTGEGADEVFAGYDIFKEARVRRFCARQPGSRMRPHLFRKLYPYLPGLKQQSAEYLAAFFGAGADSLDDPLFSHKPRMRATGAAKLFFSAQLRETLAGYDAAEELASRLPQEFPRWHPLHQAQYLESRFLLPGYILSSQGDRMAMAHGIEGRFPFLDHRLVEFATTLPPEMKLKGLVEKHILREATKGLLPESILRRTKQPYRAPDSASFRGAGEKDYVREAMSAEKLADCGLFNPASVSKLFAKSRQQPLSGFRDNAAFVGILSSQLWLETFTGSRIRAVEAA

SEQ ID NO: 9525 - protein, 461 aa, Hordeum vulgare subsp. vulgare
MVHQSNGHGEAAAAAANGKSNGHAAAANGKSNGHAAAAAVEWNFARGKDGILATTGAKNSIRAIRYKISASVEESGPRPVLPLAHGDPSVFPAFRTAVEAEDAVAAALRTGQFNCYAAGVGLPAARSAVAEHLSQGVPYKLSADDVFLTAGGTQAIEVIIPVLAQTAGANILLPRPGYPNYEARAAFNKLEVRHFDLIPDKGWEIDIDSLESIADKNTTAMVIINPNNPCGSVYSYDHLAKVAEVARKLGILVIADEVYGKLVLGSAPFIPMGVFGHIAPVLSIGSLSKSWIVPGWRLGWVAVYDPTKILEKTKISTSITNYLNVSTDPATFVQEALPKILENTKADFFKRIIGLLKESSEICYREIKENKYITCPHKPEGSMFVMVKLNLHLLEEIHDDIDFCCKLAKEESVILCPGSVLGMENWVRITFACVPSSLQDGLERVKSFCQRNKKKNSINGC

SEQ ID NO: 9526 - protein, 188 aa, Arabidopsis thaliana
MTNYGAIPTSSHASPLVDVESLSRAKHRIKAGLATRRAWRVMFDFHSMGLPHGVSDAFTRIKTNLAYFRMNYAIVVLIVIFFSLIWHPTSLIVFTVLVVVWIFLYFLRDEPIKLFRFQIDDRTVLIVLSVLTVVLLLLTNATFNIVGALVTGAVLVLIHAVVRKTEDLFLDEEAATTETSGLTSYPST

SEQ ID NO: 9527 - protein, 363 aa, Pseudomonas putida
MSALFEPYTLKDVTLRNRIAIPPMCQYMAEDGLINDWHQVHYASMARGGAGLLVVEATAVAPEGRITPGCAGIWSDAHAQAFVPVVQAIKAAGSVPGIQIAHAGRKASANRPWEGDDHIGADDARGWETIAPSAIAFGAHLPNVPRAMTLDDIARVKQDFVDAARRARDAGFEWIELHFAHGYLGQSFFSEHSNKRTDAYGGSFDNRSRFLLETLAAVREVWPENLPLTARFGVLEYDGRDEQTLEESIELARRFKAGGLDLLSVSVGFTIPETNIPWGPAFMGPIAERVRREAKLPVTSAWGFGTPQLAEAALQANQLDLVSVGRAHLADPHWAYFAAKELGVEKASWTLPAPYAHWLERYR

SEQ ID NO: 9528 - protein, 565 aa, Candida albicans SC5314
MKTTTTTTTTTTTKNGGEWIYRLDPWVHRATFAKQHALYEGHFWEDNYQFKNPRPKKNIAAGGIKIYEAHVGISTPEPTIGSYKNFTQNVLPIIRDLGYNTIQLMAIMEHAYYASFGYQVTSFFAISSRYGTPDELKELIDTAHGMGTQVLLDVVHSHSSKNVDDGLNMFNGTDHYLFHGGSRGNHDLWDSRLFNYTNYETLRFLLSNLKYYIDVFQFDGFRFDGVTSMLYKHHGLSVGFSGGYHEYFGDGVDNEAIVYLMLAHQLMNEISTTQNFNLTSIAEDVSGMPTLCRPISDGGIGFNYRLSMAIPDMWIKILKHLTDEQWDLGNIVHTLTNRRYGEKVIAYCESHDQALVGDKTLAFWLMDKEMYTNMSVLSPLTPIIDRGIALHKLIRLVTFALGGDGYLNFEGNEFGHPEWLDFPRQGNGESYHYARRQFNLINDDLLRYKYLYQFDKKMLQLEITNTGEYVSLKHEGDKVLVFEKGKSVYIFNFNPTQSFVDYRIGVELPGTYKLVLDSDSEDLGGHGRLDHNTKYFTFNEPWNNRSNSLLVYIPTRTAIVLEKVE

SEQ ID NO: 9529 - protein, 496 aa, Zea mays
  misc_feature (451)..(451): Xaa can be any naturally occurring amino acid
  misc_feature (466)..(466): Xaa can be any naturally occurring amino acid
MTMDPTKFRPSSSHDTTVTTTNAGAPVWNDNEALTVGPRGPILLEDYHLIEKVAHFDRERIPERVVHARGASAKGFFESTHDVTSLTCADFLRAPGVRTPVIVRFSQVIPEPGSGRTIRDARGFAVKFYTREGNWDLLGNNFPVFFIRDGIKFPDVIHAFKPNPRSHVQEYWRVFDFLSHLPESLHTFFFLFDHVGVPSDYRHMEGFGVNTYTFVSAAGKAQYVKFHWKPTCGERSILTDEEARVGGRNHSHTQDLYDSIAAEGSFPEWTLYVQVMDPAQQEQYDFDPLDDTKTWPEDLLPLRPVGRLVLDRNVDNFLNENEQLAFGPGLVVPGIYYSDDKMLQCRVFAYADTQRYRLGPNYLMLPVNAPRCGTHNNHYDGAMNLMHRDEEVDYYPSRHARRCGRAAPTPLPPRPVAGRREKATIRKPNDFKQPGERYRSWDADRQDRFVXRRFADSLGHPNVSQXLRSIWIDLLAKVDASLGMKIATRLNMKANM

SEQ ID NO: 9530 - protein, 349 aa, Pseudomonas fluorescens
MATIFDPIKLGDLELSNRIIMAPLTRCRADEGRVPNALMAEYYVQRASAGLILSEATSVTPMGVGYPDTPGIWSNDQVRGWTNITKAVHAAGGKIVLQLWHVGRISHPLYLNGEAPVAPSAIQPKGHVSLVRPLADYPTPRALETAEIAEIVEAYRTGAENAKAAGFDGVEIHGANGYLLDQFLQSSTNQRTDNYGGSLENRARLLLEVTDAAIDVWGAGRVGVHLAPRADSHDMGDDNLAETFTYVARELGKRGIAFICSREKEGADSLGPQLKEAFGGAYIANERFTKDSANAWLAEGKADAVAFGVPFIANPDLPARLKADAPLNEPRPELFYGKGPVGYIDYPTL

SEQ ID NO: 9531 - protein, 686 aa, Emericella nidulans
MTSTAPSDGTGIIDLDPWLEPFREAIKRRFDYVDEVEGGLDKFSKGYEKFGFNESWIKTVVSETGDITYREWAPNAIEAALVGDFNNWDTKANPMTRDNFGVWEIALPAKNGTPVIPHDSKVKVKITMVTRSGERIYRIPAWIKRVVQDLNVSPIYESVFWNPPKAERYNFQHARPKKPESLRIYEAHVGISSPDTRVATYKEFTANMLPRIKYLGYNAIQLMAIMEHAYYASFGYQVNNFFAASSRYGKPEDLKELVDTAHSMGLVVLLDVVHSHASKNVDDGLNMFDGSDHLYFHSGSKGQHELWDSRLFNYGNHEVLRFLLSNLRFWMEEYGFDGFRFDGVTSMLYTHHGIGTGFSGGYHEYFGPAVDDDGVMYLALANEMLHRLYPDCITVAEDVSGMPALCLPHGLGGVGFDYRLAMAIPDMYIKLLKEKSDNDWDIGNLAFTLTNRRHGEKTIAYAESHDQALVGDKSLMMWLCDKEMYTHMSVLTEFTPVIERGMALHKMIRLVTHALGGEGYLNFEGNEFGHPEWLDFPRAGNNNSFWYARRQLNLTEDHLLRYRFLNEFDRAMQLTESKYGWLHAPQAYISLKHEGDKVLVFERADLLWIFNFHPTESFTDYRVGVEQAGTYRVVLDTDDQAFGGLGRIDQGTRFFTTDMEWNGRRNYLQVYIPTRTALALALEETL

SEQ ID NO: 9532 - protein, 482 aa, Lactobacillus gasseri
MTGYTMPKGFLWGGAVAAHQLEGAWNEDGKGMSVADVMTVGSATKPREITDGVIPGKNYPNHDAIDFYHHYKGDIKLMAEMGFKAFRTSIAWTRIFPKGDEKEPNEAGLKFYDDLFDECHKYGIEPVITLSHFEIPYHLVKEYGGFTNRKLIDYFVRFARVCFKRYKNKVKYWMTFNEIDNQSSFNNDFLMATNSGILFKNGMGDKEKEAAMYQAAHYGLVASALAVKEGHKINPDFQIGCMINYSPVRPLTPSSDDVLLADKFEQRRDFFSDVHVNGEYPNAVEDYIERNGYRPDITEEDKIALKEGTVDYVGFSYYQSTTVSSKKVKPDELTDLQEAIVENPTLQRSDWGWEIDPEGLRISLNHLTDRYHKPLFIVENGLGAYDKREADGSVHDPYRIDYLRKHIEQMEKAVVLDGVDLMGYLPWGCIDLVSAGTGQMDKRYGFIYVDKNDKGEGTLERSKKDSFDWYKKVIESNGKDLD

SEQ ID NO: 9533 - protein, 157 aa, Triticum aestivum
MSLIRRSNVFDPFSLDFFDPFEGFPFGSGNSSSGSLVPRTSSDTAAFAGARIDWKETSEAHVFKADVPGLKKEEVKVEVEDGNILQISGERKKEQEEKTDTWHRVERSSGKFLRRFCLPDNAKAEQVKASMENGVLTVTVPKEEAKKPEVKSIQISG

SEQ ID NO: 9534 - protein, 513 aa, Pseudomonas aeruginosa UCBPP-PA14
MNPSLNAFRPGRLLVAASLTASLLSLSVQAATLTRDNGAPVGDNQNSQTAGPNGSVLLQDVQLLQKLQRFDRERIPERVVHARGTGAHGEFVASADISDLSMAKVFRKGEKTPVFVRFSAVVHGNHSPETLRDPRGFATKFYTADGNWDLVGNNFPTFFIRDAIKFPDMVHAFKPDPRSNLDDDSRRFDFFSHVPEATRTLTLLYSNEGTPASYREMDGNSVHAYKLVNARGEVHYVKFHWKSLQGQKNLDPKQVAEVQGRDYSHMTNDLVSAIRKGDFPKWDLYIQVLKPEDLAKFDFDPLDATKIWPGIPERKIGQMVLNRNVDNFFQETEQVAMAPSNLVPGIEPSEDRLLQGRLFAYADTQMYRVGANGLGLPVNRPRSEVNTVNQDGALNAGHSTSGVNYQPSRLDPREEQASARYVRTPLSGTTQQAKIQREQNFKQTGELFRSYGKKDQADLIASLGGALAITDDESKYIMLSYFYKADSDYGTGLAKVAGADLQRVRQLAAKLQD

SEQ ID NO: 9535 - protein, 490 aa, Zea mays
  misc_feature (204)..(204): Xaa can be any naturally occurring amino acid
MVLSHAASAGSSDESVHSTFASRYVRASLPRFRMPENSIPKEAAYQIINDELMLDGNPRLNLASFVTTWMEPECNKLMMDSINKNYVDMDEYPVTTELQNRCVNMIAHLFNAPLGETETAVGVGTVGSSEAIMLAGLAFKRRWQNKMKAAGKPCDKPNIVTGANVQVCWEKFARYFEVELKEVKLSEGYYVMDPEKAVEMVDEXNTICVAAILGSTLTGEFEDVRRLNDLLAANNRRTGWDTPIHVDAASGGFIAPFLYPDLEWDFRLPLVKSINVSGHKYGLVYAGVGWVVWRSKEDLPDELIFHINYLGADQPTFTLNFSKGSSQIIAQYYQLIRLGFEGYKDVMQNCRDNAAVLREGINKMGYFDVVSKDSGVPLVAFSLKDSSKYTVFEVAESLRRFGWIVPAYTMPADAEHVAVMRVVIREDFSRGLAERLIADLGKTMADMDAHAGRKQAPEQPKKSVHDIEKEVTTFWRRLVANSKKKSSMVC

SEQ ID NO: 9536 - protein, 174 aa, Brassica napus
  misc_feature (92)..(92): Xaa can be any naturally occurring amino acid
MANQVISGIKETVQSINGAARPWGDFLDLSAFSFPSSFSDATTRLTQNLAHFRINYTIILSVLLALTLITRPIAILAFVAVGLAWFFLYFAXREEALTGFGFTVDDGVVAVLLIVLTIAALVTTGVWLSALTTVGFGALVLILHAALRGTEDLVTDDLESPYGPMLSTGGGRYG

SEQ ID NO: 9537 - protein, 533 aa, Rubrivivax gelatinosus PM1
MVEGVNILANAVKVTLGPKGRNVVLERSFGAPTVTKDGVSVAKEIELKDKLQNMGAQMVKEVASKTSDNAGDGTTTATVLAQAIVREGMKYVAAGMNPMDLKRGIDKAVVSLVEQLKKQSKPTTTSKEIAQVGTISANSDDDVGQIIASAMDKVGKEGVITVEDGKSLNNELDVVEGMQFDRGYLSPYFINNPEKQSAVLDNPFVLLYDKKISNIRDLLPTLEQVAKSGRPLLIIAEEVEGEALATLVVNTIRGILKVVAVKAPGFGDRRKAMLEDIAILTGGKVIAEEVGLTLEKVTLADLGQAKRVEVGKENTTIIDGAGAAGDIEARVKQVRVQIEEATSDYDREKLQERVAKLAGGVAVIKVGAATEVEMKEKKARVEDALHATRAAVEEGIVAGGGVALLRAKQAAGAIKGDNADQDAGIKLILRAIEEPLRIIVTNAGDEASVVVNAVLAGKGNYGYNAANGTYGDMIEMGILDPTKVTRTALQNAASVAALMLTTEAMVAESPKDDAPAGGMPGGMGGMGGMGMDM

SEQ ID NO: 9538 - protein, 475 aa, Streptomyces coelicolor A3(2)
MSLHQGPRPSRDSDRDRRRLAVNPFHAAANPLGGMTEAPPAHRLPDSPLPPESAYRLVHDELMLDGNARLNLATFVTTWMEPQAGVLMSECRDKNMIDKDEYPRTAELERRCVAMLADLWHAPDPSTAVGCSTTGSSEACMLAGMALKRRWALRNADRYPAKDVRPNLVMGVNVQVCWDKFCNFWEVEARQVPMEGDRFHLDPQAAAELCDENTIGVVGILGSTFDGSYEPVADLCAALDALQERTGLDVPVHVDGASGAMVAPFLDEDLVWDFRLPRVASINTSGHKYGLVYPGVGWALWRDAEALPEELVFRVNYLGGDMPTFALNFSRPGAQVVAQYYNFLRLGREGYRAVQQSARDIAGSLAERVAALGDFRLLTRGDQLPVFAFTTADDVTAYDVFDVSRRLREGGWLVPAYTFPPHREDLSVLRVVCRNGFSADMADLLLADLERLLPELRRQPGPLTRDKGAATGFHH

SEQ ID NO: 9539 - protein, 536 aa, Nocardia farcinica IFM 10152
MAKQIEFDEKARRALERGVDKLADAVKVTLGPRGRHVVLAKAFGGPTVTNDGVTIARDIDLEDPFENLGAQLVKSVATKTNDVAGDGTTTATVLAQALVRGGLKNVAAGANPIAVGSGIAKAADAVSEALLAAATPVSGEQAIAQVATVSSRDEEIGEMVGKALTTVGKDGVVTVEESSTLQTELVVTEGVQFDKGYLSPYFITDTDTQEAVLEDAFVLLHREKISSLPDLLPLLEKIAEAGKPVLIVAEDVEGEALSTLVVNSIRKTLKAVAVKAPFFGDRRKAFLDDLAVVTAGTVVNPDLGITLREAGIDVLGKARRVVVTKDETTIIDGAGTAEDIAARAAQLRREIEATDSDWDREKLEERLAKLAGGVAVIKVGAATETALKERKYRVEDAVSAAKAAVDEGIVPGGGTALVQAATKLVELRDSLSGDEAVGVEVVRKALEAPLFWIASNAGLDGAVVVSKVAEGKEGFNAATLSYGDLLTDGVVDPVKVTRSAVVNAASVARMVLTTESAVVDKPAEEAEDHSHHGHAH

SEQ ID NO: 9540 - protein, 468 aa, Streptococcus suis 89/1591
MVKTLPKDFIFGGATAAYQAEGATQTDGKGRVAWDKYLEDNYWYTAEPASDFYNRYPVDLELSEQFGVNGIRISIAWSRIFPTGFGAVNPKGVEYYHKLFAECHKRHVEPFVTLHHFDTPETLHSNGDFLNRENIEHFVNYAAFCFKEFPEVNYWTTFNEIGPIGDGQYLVGKFPPGIQYDLAKVFQSHHNMMVSHAKAVKLYKDAGYSGEIGVVHALPTKYPYDPSNPDDVRAAELEDIIHNKFILDATYLGYYSEKTLEGVRHILKVNGGELDLRDEDFAALDAAKDLNDFLGINYYMSDWMRAHDGETEIIHNGKGEKGSSKYQIKGVGRRESPVDIPKTDWDWIIYPQGLYDQIMRVKNDYPNYKKIYITENGLGYKDEFVDGTVYDDGRIDYVKKHLEVISDAISDGANVKGYFIWSLMDVFSWSNGYEKRYGLFYVDFETQERYPKKSAYWYKKVAETQVIE

SEQ ID NO: 9541 - protein, 541 aa, Bifidobacterium breve
MAKIISYDEEARQGMLEGLDKLANTVKVTLGPKGRNVVLDKTYGAPTITNDGVSIAKEIDLEDPYERIGAELVKEVAKKTDDVAGDGTTTATVLAQSLVHEGLKNVVAGSNPIALRRGIEKATEVIVKELVVAAKDVETKDQIAATATISAADPEVGEKIAEALDKVGQDGVVTVEDNNRFGLDLDFTEGMRFDKGYIAPYFVTNADDQTAVLEDPYILLTSGKVSSQQDIVHVAELVMKTGKPLLIIAEDVDGEALPIPDSEQHSWYLQVLRCQGSGLRRPPQGMLQDMAILTGAQVVSDELGLKLESVDTSVLGHAKKVIVSKDETTIFQGAGSKEDIDARVAQIRAEIENTDSDYDREKLQERLAKLAGGVAVIKVGAATEVEAKERKHRIEDAVRNAKAAIEEGLLPGGGVALVQAAAKAEKAEAVTSLTGEEATGAAIVFRAIEAPIKQIAENAGVSGDVVINKVRSLPDGEGFNAATDTYEDLLAAGVTDPVKVTRSALQNAASIAGLFLTTEAVVANKPEPKAAAPAAGADMGY

SEQ ID NO: 9542 - protein, 548 aa, Neorickettsia risticii
MANEVISGEQLQKVIRDAADLVVSSAGVTLGPEGRPVIMSKSYGGPEVTKDGYKVINNLKPEDEKIAKIVELLNQATSQANEKAGDGTTTATILVGNMIKNAHKHIAAQRSRTKLKSGMKRARDEVVKYIQSVAKKINSEEEIAQVGSISANGNSEIGNKIAEAMNKVGKEGVITVEEGKGLDEFSVSVVQGMVFDRGYVSPYFITNPEKMIVEFDNPYVLLANKKLSSIQPMVPLLETIVRSNRAVVIIAEDVEGEALTSLVLSKMRGSLKACAVKAPGFGDRRSEMLEDIRILTGAKTLVSDDLGVTVESLTVEDLGTAKSIIISKDSTTIVDGGGEKTSIDARVKQIKTQIDKTTSDYDKEKLQERLAKLAGGVAVLKVGGATEVEVKERKDRVEDALHATRAAVEEGIVPGGGATLLSAIAVLEKLSSDDDDEQAGINIVKSALKAPISQIVENAGEDASVITYNLLESKDPNRIFDARELKYVDAFKAGIIDPAKVVRVALESAVSVASVLVTTEALIVDLPTKDNGSPSMMPGGGMGGMGGF

SEQ ID NO: 9543 - protein, 145 aa, Thermoanaerobacter tengcongensis MB4
MSLMRRGRDWWDWPFDINIRNLPSIFDINFPSLSGLFSRPRVDIVESETEIVATAELPGVDKKDIEINVYDNILEIKGQTSVDEEKEDKNYYIRERYYGSFARRIELPAEVDPERTTAKFENGILKITMPKLHPSKPKKRRIDIE

SEQ ID NO: 9544 - protein, 635 aa, Pisum sativum
MMESCECIDTPYPPDELLVKYQYISDVLIALAYFSIPVELIYFVQKSAFFPYRWVLMQFGAFIVLCGATHFINLWTFSAHSKAVAVVMTIAKVSCAIVSCATALMLVHIIPDLLSVKTRELFLKNKAEELDREMGLILTQEETGRHVRMLTHEIRSTLDRHTILKTTLVELGRTLGLEECALWMPSRSGLNLQLSHTLTYHVQVGSTVPTNLPIVNEVFNSPRATRIPHTCPLARIRPLVGRYVPPEVVAVRVPLLHLSNFQINDWPDLSAKSFAIMVLILPTDSARKWRDHELELVDVVADQVAVALSHAAILEESMRARDQLMEQNVALDLARREAEMAIHARNDFLAVMNHEMRTPMHAIIALSSLLLETELTPEQRVMIETVLKSSNVLAALINDVLDLSRLEDGSLELEMGKINLHGVLEEVIELIKPIASVKKLPITLILAPDLPDNAIGDVKRLMQTLLNVVGNAVKYTKEGYVSIRASVAKPESLQDWRPPEFYPASSDGHFYIRVQVKDSGCGILPQDIPHLFTKFTQSQSGAGRSSSGSGLGLAICKRFVNLMGGHIWMESEGPDKGSTATFVVKLGICGNPDSSDHQATTRGQAYSGSGGLARFKHLVNDGDIGFSNRRNQRSF

SEQ ID NO: 9545 - protein, 373 aa, Burkholderia sp. 383
MTTDSFLSPPRAPARPTLFDPIELGRITLRNRIVMAPMTRSRAGAGDAPGPMNATYYAQRASAGLIVTEGTQISPPGKGYPFTPGIYSDAQIAGWKQVTDAVHREGGRIFVQLAHVGRIGHPDLQPDGALPVAPSPIRPDGDAYTPTGPQPYPVPRALETAELPAIVGQYVLATRAAFQAGFDGVEIHAGNGYLLDQFLRDGTNRRTDDYGGTIDNRLRLPLEVARAVSLVSGPDRLGIRISPVTPHFGGIADSDPQALFERFADRLSGLAVYLHVVEGIPQVAPDAAPAFDYDALRHAFAGHYIANNGYTKTRAETALSDGHADLVSFGYPFIANPDFAERLRHDRPLAHADMSMAYGGGEAGYTDYPPFRA

SEQ ID NO: 9546 - protein, 160 aa, Triticum aestivum
MAGMVFGLDDPMMTALQHLLDIPDGEAGGTAGGEKQGPTRAYVRDARAMAATPADVKELPGAYAFVVDMPGLGSGDIQVQVEDERVLVISGERRREEKEDAKYLRMERRMGKLMRKFVLPENADMEKISAACRDGVLTVTVEKLPPPEPKKPKTIQVQVA

SEQ ID NO: 9547 - protein, 478 aa, Gossypium hirsutum
MDSTSKSNAATSSKKDANNGQTLLLGRYEVGKLLGHGTFAKVYHARNVKSGDNVAIKVIDKEKILKSGLIAHIKREISILRRVRHPNIVQLFEVMATKSKIYFVMEYVRGGELFNKVAKGRLKEDVARKYFQQLISAVHFCHARGVYHRDLKPENLLLDENGDLKVSDFGLSAVSDQIRQDGLFHTFCGTPAFVAPEVLARKGYDAAKVDIWSCGVILFVLMAGYLPFQDQNIMAMYKKIYKGEFRCPRWFSPELIRLLTKLLDTNPETRITIPEIMEKRWFKKGFKHIKFYIEDDKLCSVEDDDNDVGSCSDQSSMSESETELETRKRVGTLPRPASLNAFDLISFSPGFNLSGLFEEGEEGSRFVSGAPVSTIISKLEEIAKVVSFTVRKKDCRVSLEGSREGAKGPLSIAAEIFELTPSLVVVEVKKKGGERGEYEDFCNRELKPGLKELMVEESQSSAAASLATSSSYLPSDTE

SEQ ID NO: 9548 - protein, 639 aa, Thiobacillus denitrificans ATCC 25259
MCGITGIFDTSGVNAISRDLLQRMNETQHHRGPDEGGLHLEPGLGLGHRRLSIIDLSSGQQPLANEDGSVVVVFNGEIYNFQELVPELEALGHVFRTHSDTEVIVHAWEAWGEACVARFRGMFAFVLWDRNQETLFVVRDRFGVKPLYYAFLDTGEFIFGSELKSLMVHPSLGREVDPLAVEDYFAYGYVPEPRTIFKRVHKLPPGFTLTLKRGAPRALPKQYWDMPFAPVAVKDEAGAMDELVERMKESIRLRMIADVPLGAFLSGGVDSSAVVAMMATQSSTPVNTCSIGFDDPAFNEIEYAQQVADRYHTRHHVETVAADDFSLVGKLAQVYDEPYADSSALPTYRVCELARKHVKVALSGDGGDEHFAGYRRYRWFRYEERMRSIIPLGLRRPLFGTLGLLYPKADWAPKMFRAKTTFEALARDTVEGYFHGVSLLSNAQRAQLFSPAFRRELQGYQAVDVLRRHAAVAPTDDPLSLVQYLDMKTYLVGDILTKVDRASMAHALEVREPLLDHELMGWVSGLPVDLKLRGSEGKYLLKKAMEPYLPHDVLYRKKMGFSVPLAAWFRGPLAATIRTVVLGERLAGTGMFNCEFLREVVEAHQSGRRDFSVILWTVLMFDAFLGQVLGLDDTAREAA

SEQ ID NO: 9549 - protein, 162 aa, Dehalococcoides ethenogenes 195
MTLERWQPGWSLRPWRPFREILSPGLWSMLANERDWLPATEMLELKDKYLIKAEMPGINEEDIEVSVSDNVLTIKGEKKYTSEVSEENYYFSERSYGSFSRSMTLPNNTSIQNIAATLDNGILEISIPKVSEAKAKKVSVTKAAKTRKANINTKPGNPKTKS

SEQ ID NO: 9550 - protein, 227 aa, Zea mays
MRSPPPPSPLLPPPPPPRPAQAPLTWRRPLPPRRRRIHLPGAGLLRGQRRLRQDPDLPRAPVVVPRHQPSHAEVFRAAAFSRPPSLGEALARTRRNAAYFRANYALAVLAAVAASLLWHPGTLLALVLLRAAWFFLYFARGNQPLRVLGTEFDDGTVLAALCGVTVVALLFTSVGWNVVGSAMVGGALVGAHVVLRTTDDLFLTEQEAAGDGLDPVGPILPTYVRIV

SEQ ID NO: 9551 - protein, 476 aa, Pediococcus pentosaceus ATCC 25745
MKDKKFSDGFLWGGAMAANQCEGAYDIDGKGMSIMDIMTVGNSSKRRRATPEIDPQEYYPNHRGIDFYHKYKDDIKLLKEMGLKCFRTSIAWTRIFPKGDEASPNEKGLAFYDELIDTLLANNIKPVITISHYEMPLYLVEKYGGWKNKKLIDFYLNYCRVLFKRYSGKVKYWMTFNEINSTWFVPAISGVKISNDDPKYLQVKCQTMHNLFVASARAVQMGHEINSNNQIGCMVLTTVGYPKTTNPKDALAADDYITRGTLAFTDVHVRGHYPSFVKRMVQKNHLELDITDEELLDIQTGVVDYIGLSYYSSSVVSSEIDKNADSSIGGNFSMGLKNPYLKANEWGWQSDPDGFRLILRWLGQRYEIPLFVVENGYGHEDEVLSGHIIHDDYRIDYLRKHVNALAEAINEDGVDIIGYTPWGCIDLISASTGEMKKRYGMVYVDLDNTGKGTLSRYKKDSFYWYQKVIESNGGEL

SEQ ID NO: 9552 - protein, 738 aa, Prunus persica
MEACNCIEPQWPADELLMKYQYISDFFIALAYFSIPLELIYFVKKSAVFPYRWVLVQFGAFIVLCGATHLINLWTFSMHSRTVAIVMTTAKVLTAVVSCATALMLVHIIPDLLSVKTRELFLKNKAAELDREMGLIRTQEETGRHVRMLTHEIRSTLDRHTILKTTLVELGRTLALEECALWMPTRTGLELQLSYTLRQQNPVGYTVPIHLPVINQVFSSNRALKISPNSPVARMRPLAGKHMPGEVVAVRVPLLHLSNFQINDWPELSTKRYALMVLMLPSDSARQWHVHELELVEVVADQVAVALSHAAILEESMRARDLLMEQNIALDLARREAETAIRARNDFLAVMNHEMRTPMHAIIALSSLLQETELTPEQRLMVETILKSSHLLATLINDVLDLSRLEDGSLQLEIATFNLHSVFREVHNLIKPVASVKKLSVSLNLAADLPVQAVGDEKRLMQIVLNVVGNAVKFSKEGSISITAFVAKSESLRDFRAPEFFPAQSDNHFYLRVQVKDSGSGINPQDIPKLFTKFAQTQSLATRNSGGSGLGLAICKRFVNLMEGHIWIESEGPGKGCTAIFIVKLGFAERSNESKLPFLTKVQANHVQTNFPGLKVLVMDDNGSVTKGLLVHLGCDVTTVSSIDEFLHVISQEHKVVFMDVCMPGIDGYELAVRIHEKFTKRHERPVLVALTGNIDKMTKENCMRVGMDGVILKPVSVDKMRSVLSELLEHRVLFEAM

SEQ ID NO: 9553 - protein, 474 aa, Campylobacter lari RM2100
MKKLTNDFGNIVADNQNSLTAGSKGPLLMQDYILLEKLAHQNRERIPERAVHAKGSGAYGELKITADISKYTKAKVLQLGESTPLFIRFSTVAGEAGAADAERDVRGFAIKFYTKEGNWDLVGNNTPTFFIRDAYKFPDFIHTQKRDPRSNLRSNNAAWDFWSLCPESLHQVTILMSDRGIPASYRHMHGFGSHTYSLINDKNERFWVKFHFKTKQGIKNLTNEEAANLIANDRESHQRDLYEAIEKGDFPKWTFQIQVLKEDEAEKLGFNPFDLTKVWPHSIVPLIEVGELVLNKNVQNYFNEVEQAAFSPSNIVSGIGFSPDKMLQARIFSYPDAHRYRIGTNYHLLPVNRAKSEVNTYNVAGAMNFDTYKNGPAYYEPNSYDDSPKEDKSYLEPDLALEGNAQRYAPLDDDFYTQPRALFDIMNESQKEQLFKNIAASMNGVDEKIIARALSHFEKISSEYANGVKKALKM

SEQ ID NO: 9554 - protein, 756 aa, Solanum tuberosum
MAIVGGLVDVPFENKVEFDDLARFAVQDYNQKNDSSLEFKKVLNVKQQIVAGIMYYITFEATEGGNKKEYEAKILLRKWEDLKKVVGFKLVGDDSTMPGGIVNVPNPNNTKFQELARFAIQDYNKKQNAHLEFVENLNVKEQVVAGIMYYITLAATDDAGKKKIYKAKIWVKEWEDFKKVVEFKLVGDDIAKLGGITDVPFPNNPEFQDLARFAIQVYNKKENVHLEFVENLNVKQQVVAGMMYYITLAAIDAGKKKIYETKIWVKEWEDFKKVVEFKLVGDDSAKTGGIINVPNPNSPEFQDLARFAVQDYNNTQNAHLEFVENLNVKEQLVSGMMYYITLAATDAGNKKEYEAKIWVKEWEDFKKVIDFKLVGNDSAKKLGGFTEVPFPNSPEFQDLTRFAVHQYNKDQNAHLEFVENLNVKKQVVAGMLYYITFAATDGGKKKIYETKIWVKVWENFKKVVEFKLVGDDSAKLGGIINVPFPNNPEFQDLARFAVQDYNKKENAHLEFVENLNVKEQLVAGMLYYITLVAIDAGKKKIYEAKIWVKEWENFKKVIEFKLIGDDSAIIGGFTDVPFPNNPEFQDLARFAVQDYNKKENAHLEYVENLNVKEQLVAGMIYYITLVATDAGKKKIYEAKIWVKEWEDFKKVVEFKLVGDDSAKPGGIIIVPFPNSPEFQDLARFAVQDFNKKENGHLEFVENLNVKEQVVAGMMYYITLAATDARKKEIYETKILVKEWENFKEVQEFKLVGDATK

SEQ ID NO: 9555 - protein, 483 aa, Bordetella bronchiseptica RB50
MCMSTRKFRGFGLVAIGAVAGILLSVGVSAVAQRGSPLPLDELRQLSNVFAAIKNNYVEAVDDKTLIGNAISGMVSNLDPHSAYLDADAFREMQTATQGEFGGLGIEVGAEDGFVKVISPIEDTPAARAGIQAGDLIIKIDDTPTKGMSLNDAVKLMRGAPKSPITLTIMRADRPQPIVVKIVRDIIKVRSVRSKMLDNNVAYLRIAQFQEKTGPDLARHLKELGAKGAPKSLVLDLRNDPGGLLTSAIGVAGAFLPPDALVVSTDGRTPDSRHKYRATPSEYARGEGNYLNDLPGWVKTVPMVVLVNVGSASASEIVAGALQDHKRAKVLGNRTFGKGSVQVILPLSESTAVKLTTSRYFTPSGRSIQATGIEPDYVVADTADGDLFRLPREADLQRHLSNQQSPDAEVKSNNDDNTEVAGKAFEFGGKDDFQLQQALNLLAGKPVQKGSARAQAKADIKPSEGKTQRMTITPTGVEPAKSK

SEQ ID NO: 9556 - protein, 705 aa, Deinococcus radiodurans R1
MTFPLPLDHEHLQKLVTADLVRPDHLLGAHPTTEHGVQGVRFAVWAPNAQHVSVVGDFNDWNGFDHPLQRLDFGFWGAFVPAAQPGQRYKFRVTGAGGQTVDKTDPYGTFFEVRPNNASIIWQQDFEWTDAGWLEQRARRGQALEDPISIYECHVGSWARRDDGWFLNYRDLAHRLGEYVTYMGYTHVELLGVMEHPFDGSWGYQVTGYYAPTSRLGSPEDFKYLVNHLHSLGIGVLLDWVPGHFPTDEFALAHFDGSPLYEYADPRKGYHYDWNTYIFDYGRNEVVMFLIGSALKWVQDYHVDGLRVDAVASMLYLDFSRTEWVPNIYGGRENLEAIAFLKRLNEVAHHMAPGCLMIAEESTSFPGVTTPTPEGLGFDYKWAMGWMNDSLAYFEQDPIYRKYDHHKLTFFNVYRTSENYVLAISHDEVVHLKKPMVLKHPGDWYAQRADYRAFLAMMWTTPGKKLLFMGQDFAQGSEWNHDAPLPWFHADQPDHRGVMNLVRRLNELYRERPDWHTGDAREEGMAWISADDTDNSVYAYARRDTYSGAWSLVIANLTPVYREDYVIGVPQGGEYRVLLSTDDGEFGGFGTQQPDLSARDEAAHGQAHALHLNLPPSSVLVLEPVAAAPVKGLVSRQELTPELREVARQSAQAVQVERAADPRPNEQQRLVAETPAHEGGRSAPADAAESAEQKPDDEQKGGKKA

SEQ ID NO: 9557 - protein, 576 aa, Triticum aestivum
MLEQVCTKKSLVPVRNSRDIVDPRVRSGTRPRSPCPPPNVLPASSPPHHARTRARALARSRSLGPSLLLCLLAPSARREVPAGRRTRARARSSSLSGPSLLDLRPRREGGAGRPANPRPRARRAGMAASEGAMRMGKYEMGRTLGEGHFGKVRLARHADTGRAFAIKILDRQRILAMKIDEQIKTEIATLKLLKHPNVVRLYEVAASKTKIYMVLEYVNGGELFEKIALKGKLSEKEGRKLFQQLMDAVSYCHERGVYHRDLKPENVLVDAKGNIKVSDFGLSALPQHQRGRVGLHTTCGSPNYIAPEVLLNKGYDGSMSDVWSCGVILYVMLTGNLPFDDENMVVLYQKILKGDYRIPKWLSPGAQDILRKLLDPNPITRLGMDGLREHDWFNQSYTPAVPFDDDDDNYVGDDNSHMTKNNGIPDNPAINQMNAFQLIGMSSCLDLSGFFEKEDVSERKTRFASNYPPTYLFEKIESNVINMGFQVQKNNGKLKVIQERKGPTNPRGHGSLLISAEVFEINESLYVVELKRSCGDCSLYRQLCATLSDDLGICKSQQLLKNDSIRQELYRFNSSF

SEQ ID NO: 9558 - protein, 579 aa, Corynebacterium efficiens YS-314
MVSLVSMLTSLKYRVWAPRPEDVRLHLNGETLPMTRTDGDWWVADREPAVGDRYGFELFDGTEWSKTVPDPRSQYQPDGVHGLSEVISPDFAWSDDAWTGRILPGSVIYELHVGTFSPSGDFDGVIERLDYLKDLGVTAVELMPVQPFGGNRNWGYDGVLWHAVHSGYGGPVGLKKLVDACHNAGIAVYLDVVYNHFGPDGNYNGMFAPYTAGGSTGWGEVVNINGPESDEVRRYILDAVTRWFEEFHIDGLRLDAVHSLDDNGAFPLLEQMTVASEAIAAATGIPRSLIAESDLNDPRLVTSREAGGYGLHAQWVDDIHHALHTLVSGERNGYYSDFGDTATLASTLEKVFHHTGQVSTFRGRRHGREIRRDVTPASRFVTYTTTHDQTGNRAVGDRPSMNLTPAQQMLKAAVIYCSPYTPMLFMGEEYGATTPFAFFCSHTDDELNRLTSEGRKREFARLGWDPETIPTPSEESTFTDSKLDWSFTPEQENILEGYRTLLRLRRELGMSQPDLLSMEISNGPGWISMANGDGILVANFSDSDVEVPFGGELIYSFTSPEVREDSTVLDAYGFAVLRR

SEQ ID NO: 9559 - protein, 316 aa, Solibacter usitatus Ellin6076
MPAIGLGTFGSDHVSAEQIADVVRDAAVVGYRHFDCASVYRNEDRIGFAFRDIMKGGIRREDLWITSKLWNDKHGEGDVIASCRQSLADLQLDYLDMYLVHWPFPNFHPPGCDVSSRSPDARPYIHENYMKTWREMERLVELGLVRHIGTSNVTIPKLKLILRDARIRPAVSEMEMHPHFQQRELFEFVRAAGIEPIAYSPIGSPGRPERDRTPEDTVDIEDPVIVAIAKRIGVHPAVVCVKWAEQLGATPIPFSTRRRNYLANLQGVVSDPLTAADMEAIAGIDRNCRLIKGQVFLWKQDQTWEDLWDLKGVIAQ

SEQ ID NO: 9560 - protein, 160 aa, Butea monosperma
NKVRMIVDCHAKHVKVLQDEKLTFDLTLCGSTLRAPHSCHLQYMSNMDSIASLVMAVVVNDNEEDGDPDAVQPQKRKRLWGLVVCHNTTPRFVPFPLRYACEFLAQVFAIHVNKEIELEYQIIEKNILRTQTLLCDMLMRDAPLGIVSQSPNIMDLVKCD

SEQ ID NO: 9561 - protein, 517 aa, Glycine max; identical to SEQ ID NO: 159

SEQ ID NO: 9562 - protein, 355 aa, Shewanella sp. MR-4
MTIEHAANSVGNLFDTYTLNDTITLKNRILMAPLTRCMADADLVPTDDMVAYYARRAEAGLIISEATIIRPDGQGYPNTPGIFNQAQIAGWRKVTDAVHANGGKIFVQLWHTGRVAHPHFFGGGDVLAPSAEKVEGSVPRMRELTYVTPKAATLEDIQGLVRDYAKAAENAIEAGFDGVEIHGANGYLIDAFLHHDSNRRTDEYGGTPANMSRFALEVVDAIAARIGKDRTGLRISPGAYFNMAVDNRDRAVFDYLLPELEKRELAFVHIGIFDDSMEFDYLDGRVSSYVRANYGKTLVGVGGYSAQSASEAIAADKFDLIAIGRPFIANPDYVARVRQGHELVTYSDEMLASLV

SEQ ID NO: 9563 - protein, 165 aa, Butea monosperma
LFMKTKVRMIVDCRAKHVKVLQDKKIPFDLTLCGSTLRAAHSCHLQYMENMNSSASLVMAVVVNDNDEHGDSSDAVPPQKRKRLWGLVVCRHTTPRFIPFPLRYACEFLAQVFAIHVNKELELEYQIVEKNILQTQTLLCDMLMRDAPLGIVSQSPNIMDLVKCD

SEQ ID NO: 9564 - protein, 477 aa, Listeria innocua Clip11262
MTESKFPKGFLWGGAVAANQCEGAYLEDGKGLSLVDILPTVEDGRWEALFNPSKALATDYGFYPSHESIDFYHRYKEDIKLMAEMGFKCFRMSISWPRIFPNGDETTPNEKGLAFYDAVFDECHKYGIEPVVTINHFDTPLEVFKKYGGWKNRKCIDFYLNFCEAIFTRYKDKVKYWMTFNEINMILHLPYIGGGLDVTKEANPEEVKYQAAHHQLVASALATKLGHEINPENQIGCMLAAGNTYPMTCNPKDVWKSIEADREGYFFIDVQARGYYPSYTKRFFKEHNINIKMEDGDLDALRDHTVDYVAFSYYSSRLTSADPEKNKETEGNVFATLKNPYLKASEWGWQIDPLGLRITMNTIYDRYQKPLFIVENGLGAVDTVEEDGSINDDYRIDYMREHVREMGEAIEDGVELLGYTPWGCIDLVSAGSGEMKKRYGFIYVDRDNKGNGTLNRSKKKSFDWYKKVIETNGKDID

SEQ ID NO: 9565 - protein, 206 aa, Cryptococcus neoformans var. neoformans JEC21
MATRKKHLLKVIILGDSGVGKTSLMNQYVNKRFSTQYKATIGADFLTRELVVDDRVVTMQLWDTAGQERFQSLGVAFYRGADCCVLVYDVNSNKSFEALDGWRDEFLVQASPHDPENFPFVVLGNKIDMEESKRMVSQKRAMTWCQAKGNIPYFETSAKEAINVEQAFQTIAKNALAQEAETELYADYPDPIRIDSESTQNYGCNC

SEQ ID NO: 9566 - protein, 552 aa, Coxiella burnetii
MAAKVLKFSHEVLHAMSRGVEVLANAVKVTLGPKGRNVVLDKSFGAPTITKDGVSVAKEIELEDKFENMGAQMVKEVASRTSDDAGDGTTTATVLAQAILVEGIKAVIAGMNPMDLKRGIDKAVTAAVAELKKISKPCKDQKAIAQVGTISANSDKSIGDIIAEAMEKVGKEGVITVEDGSGLENALEVVEGMQFDRGYLSPYFINNQQNMSAELENPFILLVDKKISNIRELIPLLENIAKSGRPLLVIAEDIEGEALATLVVNNIRGVVKVAAVKAPGFGDRRKAMLQDIAVLTGGKVISEEVGLSLEAASLDDLGSAKRVVVTKDDTTIIDGSGDAGDIKNRVEQIRKEIENSSSDYDKEKLQERLAKLAGGVAVIKVGAATEVEMKEKKARVEDALHATRAAVEEGVVPGGGVALIRVLKSLDSVEVENEDQRVGVEIARRAMAYPLSQIVKNTGVQAAVVADKVLNHKDVNYGYNAATGEYGDMIEMGILDPTKVTRTALQNAASIAGLMITTECMVTEAPKKKEESMPGGGDMGGMGGMGGMGGMM

SEQ ID NO: 9567 - protein, 552 aa, Coxiella burnetii
MAAKVLKFSHEVLHAMSRGVEVLANAVKVTLGPKGRNVVLDKSFGAPTITKDGVSVAKEIELEDKFENMGAQMVKEVASRTSDDAGDGTTTATVLAQAILVEGIKAVIAGMNPMDLKRGIDKAVTAAVAELKKISKPCKDQKAIAQVGTISANSDKSIGDIIAEAMEKVGKEGVITVEDGSGLENALEVVEGMQFDRGYLSPYFINNQQNMSAELENPFILLVDKKISNIRELIPLLENIAKSGRPLLVIAEDIEGEALATLVVNNIRGVVKVAAVKAPGFGDRRKAMLQDIAVLTGGKVISEEVGLSLEAASLDDLGSAKRVVVTKDDTTIIDGSGDAGDIKNRVEQIRKEIENSSSDYDKEKLQERLAKLAGGVAVIKVGAATEVEMKEKKARVEDALHATRAAVEEGVVPGGGVALIRVLKSLDSVEVENEDQRVGVEIARRAMAYPLSQIVKNTGVQAAVVADKVLNHKDVNYGYNAATGEYGDMIEMGILDPTKVTRTALQNAASTAGLMITTECMVTEAPKKKEESMPGGGDMGGMGGMGGMGGMM

SEQ ID NO: 9568 - protein, 368 aa, Pseudomonas aeruginosa UCBPP-PA14
MSLLFEPLSLRQITLPNRIAVSPMCQYSAQEGLANDWHLVHLGSRAVGGAGLVIVEATAVLPEGRITADDLGIWSDAHVEPLHRITRFIESQGAVAGVQLAHAGRKASTWRPWLGKHGSVPIGQGGWIPVAPSAIPFDPQHTTPEALSEAQIEALVQAFVRATERSLAAGFKVAEVHAAHGYLLHQFLSPLSNQRRDQYGGCFENRIRLLLQVTAAVRKAWPEELPLFVRLSATDWVEDGWNPDETVELARRLKDLGVDLIDVSSGGTAANAEIPVGPGYQTEFAERVKKEAGIASGTVGMITEPVQAEHILRTGQADLILLARELLRDPYWPLHAADELRNEQMPWPPQYLRAAHRSTPPRKSLEMQ

SEQ ID NO: 9569 - protein, 159 aa, Glycine max
  misc_feature (133)..(133): Xaa can be any naturally occurring amino acid
DGVWVDRIPAWIKYATVDPTRFAAPYDGVYWDPPLSERYQFKYPRPPKPKALRIYEAHVGMSSFEPRINSYREFADEILPRIRANNYNTVQLMAVMEHSYYASFGYHVTNFFAVSSRSGTPEDLKYLIDKAHXLGLQVLMDVIHSHASNNVTDGLNGFD

SEQ ID NO: 9570 - protein, 449 aa, Bacillus circulans
SIHMFPSDFKWGVATAAYQIEGAYNEDGRGMSIWDTFAHTPGKVKNGDNGNVACDSYHRVEEDVQLLKDLGVKVYRFSISWPRVLPQGTGEVNRAGLDYYHRLVDELLANGIEPFCTLYHWDLPQALQDQGGWGSRITIDAFAEYAELMFKELGGKIKQWITFNEPWCMAFLSNYLGVHAPGNKDLQLAIDVSHHLLVAHGRAVTLFRELGISGEIGIAPNTSWAVPYRRTKEDMEACLRVNGWSGDWYLDPIYFGEYPKFMLDWYENLGYKPPIVDGDMELIHQPIDFIGINYYTSSMNRYNPGEAGGMLSSEAISMGAPKTDIGWEIYAEGLYDLLRYTADKYGNPTLYITENGACYNDGLSLDGRIHDQRRIDYLAMHLIQASRAIEDGINLKGYMEWSLMDNFEWAEGYGMRFGLVHVDYDTLVRTPKDSFYWYKGVISRGWLDL

SEQ ID NO: 9571 - protein, 256 aa, Selaginella remotifolia
ETWLVTTTSSSNPEVGLATGLAATGGAQDLLNPPLNKQKEPPVGRGKIEIKRIENATSRQVTFSKRRGGLLKKAHELSVLCDAQVALIIFSSTGKLFEYASTSMKEILDRYGKYPESVQGGNMASHHEASDFISHEIRRLKQQLQRSQQSRRHLLGDDLSHLPIKDLQNLEQQLEVGLSRVRSRKDQVLMDQVDELRRRELTLHKDNEMLRRRLSDVQGMAESGRSTLIVNPWRQGNLLQTWQMYPCHFLDTKAAA

SEQ ID NO: 9572 - protein, 296 aa, Pinus pinea
SAKGFFEVTHDISHLTCADFLRAAGVQTPLIVRFSTVIHERGSPETLRDPRGFAVKFYTREGNFDLVGNNFPVFFVRDGMKFPDMVHALKPNPKSHIQEDWRILDFFSHHPESLHMFTFLFDDLGIPLNYRHMDGSGVHTFTLVNKAGRQTYVKFHWRPTCGVKCLLDDEAVVVGGTNHSHATKDLYDSIAAGNYPEWKLFIQTMDPRDEDKYDFDPLDVTKTWPEDIFPLQPVGRMVLNKNIDNFFAENEQLAFCPALVVPGVYYTEDKLLQTRVFSFADTQRHRLGPNYLMLPA

SEQ ID NO: 9573 - protein, 399 aa, Saccharomyces cerevisiae
SFVKDFKPQALGDTNLFKPIKIGNNELLHRAVIPPLTRMRALHPGNIPNRDWAVEYYTQRAQRPGTMIITEGAFISPQAGGYDNAPGVWSEEQMVEWTKIFNAIHEKKSFVWVQLWVLGWAAFPDNLARDGLRYDSASDNVFMDAEQEAKAKKANNPQHSLTKDEIKQYIKEYVQAAKNSIAAGADGVEINSANGYLLNQFLDPHSNTRTDEYGGSIENRARFTLEVVDALVEAIGHEKVGLRLSPYGVFNSMSGGAETGIVAQYAYVAGELEKRAKAGKRLAFVHLVEPRVTNPFLTEGEGEYEGGSNDFVYSIWKGPVIRAGNFALHPEVVREEVKDKRTLIGYGRFFISNPDLVDRLEKGLPLNKYDRDTFYQMSAHGYIDYPTYEEALKLGWDKS

SEQ ID NO: 9574 - protein, 399 aa, Saccharomyces cerevisiae
SFVKDFKPQALGDTNLFKPIKIGNNELLHRAVIPPLTRMRALHPGNIPNRDWAVEYYTQRAQRPGTMIITEGAFISPQAGGYDNAPGVWSEEQMVEWTKIFNAIHEKKSFVWVQLWVLGWAAFPDNLARDGLRYDSASDNVFMDAEQEAKAKKANNPQHSLTKDEIKQYIKEYVQAAKNSIAAGADGVEINSAHGYLLNQFLDPHSNTRTDEYGGSIENRARFTLEVVDALVEAIGHEKVGLRLSPYGVFNSMSGGAETGIVAQYAYVAGELEKRAKAGKRLAFVHLVEPRVTNPFLTEGEGEYEGGSNDFVYSIWKGPVIRAGNFALHPEVVREEVKDKRTLIGYGRFFISNPDLVDRLEKGLPLNKYDRDTFYQMSAHGYIDYPTYEEALKLGWDKS

SEQ ID NO: 9575 - protein, 90 aa, Lycopersicon esculentum
NRAGKSTYVKFHRKPTCGVMSLLEEEADRVGGANHSHATQDLYDSTAAGNYPEWKIFIQTMDPDHEDRFDFDPLDVTKTWPDDILPLQPD

SEQ ID NO: 9576 - protein, 54 aa, Triticum aestivum
LHVHISPFSAGSDSGASDSRGKRISSLFHPFFPLALSIQQTNMQPTVVNVHFRR

SEQ ID NO: 9577 - protein, 233 aa, Solanum tuberosum
FGYHVTNFFAVSSRYGNPEDLKYLIDKAHSLGLQVLVDVVHSHASNNVTDGLNGFDIGQGSQESYFHAGERGYHKLWDSRLFNYANWEVLRFLLSNLRWWLEEYNFDGFRFDGITSMLYVHHGINMGFTGNYNEYFSEATDVDAVVYLMLANNLIHKIFPDATVIAEDVSGMPGLSRPVSEGGIGFDYRLAMAIPDKWIDYLKNKNDEDWSMKEVTSSLTNKRYTEKCIAYAE

SEQ ID NO: 9578 - protein, 188 aa, Brassica napus
  misc_feature (43)..(43): Xaa can be any naturally occurring amino acid
  misc_feature (155)..(155): Xaa can be any naturally occurring amino acid
  misc_feature (160)..(160): Xaa can be any naturally occurring amino acid
  misc_feature (174)..(174): Xaa can be any naturally occurring amino acid
STQRVRCERICGVLLIEELGLENEAEKPSNALLTRAWSPGWSXADKILTEFIEKQLIDYAKNSKKVVGNSTYLLSPYLHFGEISVRRVFQCARMKQIIWARDKNGQGVESAVLFLRGIGLRDYSRYICFNFPFTHEQSLLSHLRFFPWDADVEKXKAWRXGRTGYSEVDAGMRXELWATGLMHNRIRV

SEQ ID NO: 9579 - protein, 170 aa, Craibia brevicaudata
PQATRFLFMKNKVRMIVDSRAKHVKVLQDQKIPFDLTLCGSTLRAPHSCHLQYMENMNSSASLVMAVVVNDNDEDGDSSDAVQPQKRKRLWGLVVCHHTTPRFVPFPLRYACEFLAQVFAIHVNKELELEYQIVEKNILRTQTLLCDMLMRDAPLGIVSQSPNIMDLVKC

SEQ ID NO: 9580 - protein, 198 aa, Craibia brevicaudata
EDDHGEVIAEITKPGLEQYLGLHYPATDIPQAARFLFMNNKVRMIVDCHAKHVKVLQDEKLLFDLTLCGSTLRAPHSCHLQYMANMDSIASLVMAVVVNDNEEDGDSSDAVQPQKRKRLWGLVVCHNTTPRFVPFPLRYACEFLAQVFAIHVNKEIELEYQIIENNILRTQTLLCDMLMRDAPLGIVSQSPNIMDLVK

SEQ ID NO: 9581 - protein, 279 aa, Triticum aestivum
SGIIIPSLAMKIAKGIEVGDERLTNLKGVIAGNPLTDTTTYFNAQIAFLHRMAIIPDEIYEAAREGCGGEYRWPSNSHCAKSLQDIKECMSGLNDVHILEKICPEYPSLTLHKQPALQDHGRRRLTESAVSSVCRNATYFLSELWTRDEAVRESLGIHKDTVPSWLRCDFNLPYTYEINSTVDDHLALITKGYRAMIYSGDHDSKISYVDTQAWIRRLNLPITHRWRPWHLDDQIVGYTRTYSNNLTYATVKGAGHTAPEYMPRECLAMIDRWLSGEPL

SEQ ID NO: 9582 - protein, 204 aa, Derris elliptica
YKFHEDDHGEVIAEITKPGLEPYLGLHYPATDIPQAARFLFMKNKVRMIVDCHAKHMKVLQDEKIPFDLTLCGSTLRAPHSCHLQYMANMDSIASLVMAVVVNDNEEDGDSSDAVQPQKRKRLWGLVVCHNTTPRFVPFPLRYACEFLAQVFAIHVNKEIELEYQIIEKNILRTQTLLCDMLMRDAPLGIVSQSPNIMDLVKCD

SEQ ID NO: 9583 - protein, 145 aa, Derris elliptica
EDDHGEVIAEVKRPGLEPYLGLHYPATDIPQATRFLFMKNKVRMIVDCRAKHVKVLQDKKVPFDLTLCGSTLRAPHSCHLQYMENMNCSASLVMAVVVNDNDEDGDSDAVQPQKRKRLWGLVVCHNTTPRFVPFPLRYACEFLAQ

SEQ ID NO: 9584 - protein, 492 aa, Prunus mume
MGSSSATANRFLLSKIATSEGHGENSPYFDGWKAYDRNPFHPTKNPEGVIQMGLAENQLSFDSIEDWIKKNPKASICTPEGVEEFKNVAIFQDYHGFPEFRKAVAMFMSKARGGRVTFDPNRVVMSGGATGANELVMFCLADPGDAFLVPSPYYPAFFRDLGWRTGVQIVPVDCDSSNNFKITKEALEAAYEKAQKNNINVKGLIITNPSNPLGTTLDRNTLESLVEFINQKNIHLVCDEIYAATVFSSPTFTCISEVIQNMNCNPNLIHIVYSLSKDMGLPGLRVGIVYSYNDDVVNIGRKMSSFGLVSSQTQHMLPSMLLDEEFVARFLETSPKRLAKRHGVFTKGLEEVGINCLKSNAGLFCWMDLRRLLEDQTFDGEMVLWRVIVNEVGPNVSPGSSFKCVEPGWFRVCFANMDDETLEVALKRIRTFVRQGKKAQDQVVQVKSPKRWKSNLRLSFSSSSTRRFDQESVNVLSPHMMSPHSPLVRAKT

SEQ ID NO: 9585 - protein, 241 aa, Populus trichocarpa
MEYQNESLESSPLRKLGRGKVEIKRIENTTNRQVTFCKRRSGLLKKAYELSVLCDAEVALIVFSSRGRLYEYSNDSVKSTIERYKKASADSSNTGSVSEANAQYYQQEAAKLRSQIGNLQNSNRHMLGEALSSLSVKELKSLEIRLEKGISRIRSKKNELLFAEIEYMQKREVDLHNNNQLLRAKISENERKRQSMNLMPGGADFEIVQSQPYDSRNYSQVNGLQPASHYSHQDQMALQLV

SEQ ID NO: 9586 - protein, 253 aa, Nicotiana tabacum
MALETLNSPTTTTPPTFQFENNGQLRYLENWTKGKRSKRPRSMERQPTEEEYLALCLIMLARSDGSANQEQSLTPPPAPVMKIHAPPEEKMVYKCSVCGKGFGSYQALGGHKASHRKLVAGGGGGDDQSTTSTTTNATGTTSSANGNGNGSGKTHECSICHKCFPTGQALGGHKRCHYDGGNSNASVSVSASVGVTSSEGVGSTVSHRDFDLNIPALPEFWPRFGFGEDEVESPHPAKKSRLSLPPKFELFGE

SEQ ID NO: 9587 - protein, 238 aa, Populus trichocarpa
MAYQNEPQESSPLRKLGRGKVEIKRIENTTNRQVTFCKRRNGLLKKAYELSVLCDAEVALIVFSSRGRLYEYSNNSVKSTIERYKKACADSSNNGSVSEANAQFYQQEAAKLRSQIGNLQNSNRNMLGESLSALSVKELKSLEIKLEKGIGRIRSKKNELLFAEIEYMQKREIDLHNNNQLLRAKIAENERKRQHMNLMPGGVNFEIMQSQPFDSRNYSQVNGLPPANHYPHEDQLFS

SEQ ID NO: 9588 - protein, 514 aa, Zea mays
  misc_feature (407)..(407): Xaa can be any naturally occurring amino acid
MDGRRTILMGRYEIGKQLGQGTFAKVFYARNLTTGLAVAIKMINKDKVMKVGLMEQIKREISIMRLVKHPNILQLYEVMASKSKIYFVLEYAKGGELFNKIAKGGKLSEDVARKYFQQLVSAVDFCHSRGVYHRDLKPENLLLDENENLKVSDFGLSALAESKRQDGLLHTTCGTPAYVAPEVLSRKGYDGAKADVWSCGVILFVLVAGYLPFHDTNLIEMYRKISRAEFRCPRFFSTELKDLLHKILVPDPSTRISISRIKRSAWYRKPVEAHAKKNEAETSENTCTGEGTTSVSTECSTSEGNQGPLSLPNLNAFDIICLSTGFNLSGFFEDKYGRREERFTTRQPVTTVFTKLKELAKRLKLKVNKKENGTLKLAAPKEGKKGMLELDAEIFEVAPSLLLVELXKKTNGDTLEYQKLVKEEIRPALKDIVWVWQDDQHQCSQLPESLLSPPETQDELRLSLPQQEGQDFLEAPLPSLSLDQLKSPTAPEQAEQLPQPEQLQTPIAPEEQIN

SEQ ID NO: 9589 - protein, 283 aa, Bacteroides fragilis YCH46
MDFKELNNGVKMPIQGFGVFQIPDATECERVVTDALAVGYRLIDTASVYGNERAVGMAIRKSGIPREELFITTKAWISEMGYERTLRALDTSLARLGLDYLDLYLIHMPFGDYYGAWRAMEKLYAKGRVRAIGVCNFEPDRLLDLCHNANVIPAVNQIEVHPYTPQTDAIRTMQELGIQAEAWGPLAEGRNGLFTDDILTGIARKYDKSAAQVVLRWHLQRGVVAIPKSVHRQRMQENFNIGDFMLTPEDMAAIASMNMGYDMILDLHAPEEVQRLYGIECPA

SEQ ID NO: 9590 - protein, 309 aa, Cryptococcus neoformans var. neoformans JEC21
MSAPTSFKLNNGVEIPAVGLGTWQAPPGQVQAAVAHALKNGYRHLDCALIYQNEAEVGDGIKESGVPRSEIFITSKVWNTHQPNVADGLRQTLEALQTDYLDLYLIHWPVRLVPNESSGLLPVNPDGSRSVDRDWDQSETWRQMEEVYASGKVKAIGVANWSIPYLEELKKTWKIVPAVNQVELHPFLPQHKLVKYCRDLGILLEAYSPLGSTNAPLLSDPEINAIAEKYKTSPATICISYQVNRGIVVLPKSVSPKRIEDNLKTIPIEKEDMVKLDGMAAAGKAQRINTPKWGWDLGFDDWYGPVKQQ

SEQ ID NO: 9591 - protein, 150 aa, Betula pendula
GVKCLLDDEAIRVGGANHGHATKDLYVSIGAGNYPEWKLYIQIIDPDHEDKFDFDPLDVTKIWPEDILPLQPVGRLVLNKNIDNFFAENEQLVFCPSIVVPGVYYSDDKLLQTRIFSYSDTQRHRLGPNYLQLPANAPKCAHHNNHHEGF

SEQ ID NO: 9592 - protein, 393 aa, Acinetobacter sp. ADP1
MAQRFNYRVFLTSVLMCLSPLSFAAPLIQPSSNVDEDGHELHSAEVPVESIQQFVQIYNLVKDNYVEAKSDDALFQQAIKGLVSGLDRYSRYLSPEDYKQLVQYTEGDLASVDFALVYDARIHQWVVRDLKEGADSYKLGLRNGQNVLKIDGQDLQTLNHDQVHTLLYGSIGTPIQIQTAEMPVSQTLIRNKKIEADVQPILLHNQVLVLKVKVFQQDTANEIKRLLEEYGSPRLKAVIIDLRNNPGGLLSAAVESADLFLNQGIIVSTKSRSEGNQQFQALPSSEFLRLKMGILINHRSASAAEVFTAAMKDHQRAWVIGEKSYGKGVVQKLFPLPDGSALQMTVSHYYTPDGSMIEGKGIQPNQRYPLPADMKDETYLENVADLLLKQPKS

SEQ ID NO: 9593 - protein, 409 aa, Rubrivivax gelatinosus PM1
MPKPIAKSSKLANVCYDIRGPVLDKARAMEEEGQKIIKLNIGNLAVFGFDPPDEIVQDMIRNLSQTAGYTDSKGLFAPRKAVVHYAQEKAISGVTVDDVYLGNGASELIVMSLNALLDNGDEVLVPAPDYPLWTAAVSLSGGNPVHYLCDEASDWYPDIDDIRRKITPNTRAIVVINPNNPTGALYPESLLREIVELARQHQLIIFADEIYDKTLYDGNTHTSIASLADDVLCVTLNGLSKNYRACGYRAGWMVVSGDKRCAKDYIEGLNMLASMRLCANTPGQLAIQTALGGYQSIKDLVAPGGRLTRQRDMAYELLSQIPGVSVVKPKAALYMFPRLDPKLYPIQDDQQFAYELLAEEKVLIVQGTGFNWPQPDHFRVVFLPNSDDLSDAIGRIARFLDHYRKRHSV

SEQ ID NO: 9594 - protein, 481 aa, Pseudomonas aeruginosa UCBPP-PA14
MNGLPMNLIWFRCDLRTTDNSALLAAADGRPCVALYLLSPAQWREHDDAPCKVDFWLRNLGELQRQLAALNIPLLVRDCGHWRQAPEVIGRLCRELGIGAVHVNQEYGVNEERRDQAVGQRLREQGVAFHSHLDQLFFAPGSVLTRTGGYFQVFSQFRKVCHERLYQALPGVRPRPQPQPPHALASDPLPDAVPAFPRPADSLRRLWPAGEEVAQERLRGFADQHLADYHERRDFPALPGTSQLSPYLAAGVLSPRQCLDAALVANRGEFSGGQQGAATWINELLWREFYKHILVGYPRVSRHRPFREETEALRWRQAPAELEAWQQGRTGIPIIDAAMRQLLATGWMHNRLRMVVAMFLSKNLLIDWREGERWFMRHLIDGDLAANNGGWQWSASTGTDAVPYFRLFNPLSQSERFDPRGEFIRHWLPELAGLERKAIHDPSSLGLFAGVDYPRPMVDLKASRERALAAFRNLPPRDGRA

SEQ ID NO: 9595 - protein, 402 aa, Frankia sp. EAN1pec
MSHDRTGVSPPVLLTVGPATATSRASLPAVPVEPAPPAVAAVPVEPSRPVATAVAVRPPTPVGPAAACPPPVSTAGRRTLAKAAVGAAAAGESAASPRAAGAAPELDPRPKSRAEQILLALFLGGPLLAVALAVPFAWGWGLSWHDVVIGAVMYVIGGLGITVGYHRHFTHGAFKARRGLRIALALAGSMAIEMSVIDWVAAHRRHHRFSDRDGDPHSPWRFGPGTRSLARGLLHAHVGWLFAPRRTNAQRYCPDLLADRDIRRISDRFGWLVAVSMLLPPLVGGLWAGSWTGALTAFFWASLVRVFLLHHVTFSINSICHVLGATPFATRDHSGNVWWLAVPSFGEAWHNLHHADPTSARHGVLRGQIDLSAGLIAVFERLGWAHDVRWPDSERIAAKRAA

SEQ ID NO: 9596 - protein, 841 aa, Leptospira interrogans serovar Copenhageni str. Fiocruz L1-130
MIKSLRISCIFFILISFLTFLLNCSQFKQNNPIASNGVIDLSTWNPNIESINLKGNWEFCWDQWIPPNAEESQWKENCNGFYPVPAYWKFYNIPGKNLSPFGKATYRLKVILPTSFHDSYGIRWTEILSAFQIFINNKSVAQIGVLGTDFNTMTPKLKPDRTEIGPQNNQMTIVIWVSNFNHQNHGFWQPIYLGKWEIIRNTQVSHLMMDIASFASVALIGFYHLVLFLFRTRSKEYLFFGLFCISMGIRQLSVEDHAFIIFFPDIDFDFYIRFIYFTVLSIGIFMCMFIKSLFPEEVSSFFINSAIGVFGCSSFTLALPVRVFTEFFSIIFVLISFLPLGLTTYLFKAHKMKRKGATLILIAYLIFSTVVLNDILFTLGYISTGYISYIGITVFIFFQAGVLAQQLTQAFNHSEDLALELKSTLQENIETHNELLALKELQNTNLEFQVQSRTRELLKARDDAEFANKVKSQFLASMSHEIRTPLNGIIGLIEQFKSTPLDENQQYIRNLIQKSGENLLKIINDILDFSKLEEDKINLELHEFYWKETVEETIGIFLYQATQKGLVLSVDYSPDFIDKSVGDKRRITQVLSNLISNAVKFTDSGKIQIRAFSEKIETKIEYKIQVIDSGIGIPREKIDLLFQKFFQLDSSISRKYGGTGLGLAISKKLVELMNGKIHVSQNKSKGSTFEFTVLLSEFVSKDHSTYLPEITDLSSLSPDTFILIAEDDSTNIFLLSGILKKLKIKFELAKDGLEAITKVRVSRFDLIFMDINMPHLDGISASNFILTDPMISPKPVIIAVTADVLQEDKIKCRQAGMSDFLGKPYYKKDIEQMIYKWLVIH

SEQ ID NO: 9597 - protein, 274 aa, Oceanobacillus iheyensis HTE831
MEYVTLNNGLKMPQLGFGVWKVPNEEVVSPVEHALKVGYRSIDTAKVYGNEVGVGEAISNSGIPREQLFITTKVWNSDHGYDNTLKAFDESLERLGLDYVDLYLIHWPTPEFDQYVETYKALETLYKDGKVKAIGVCNFDIEYLERILNECEIVPVLNQVECHPYLQQKELRDFCEKHNIYLESYSPLMNGKEVLQSEELQNLAERKGKTVAQTILRWHLQSGMIVIPKSVTPNRIEENLDVFDFELTDTEMQEINELDRNLRSGAVPSEMNVR

SEQ ID NO: 9598 - protein, 1319 aa, Neurospora crassa
MPFITPGQLAFSAMQFLPVPILVLDSLKTVVLANESMGRLLGMPSDATGEGDDLSSTMDQLRGQTLSQVGIDLIQDGMPVWIAWEHFLDQIALEMGVGNSGGKEILKSVLQTDPDGDATPRQAELPPSASTSSPRSRSTSAQSGDGVCDGDAGNTTCRPSPNAVVDVVIVKRDIARSTYHTRARSESSTFHAQAKMIISVWQLSPQQTFFTLTFTNTDSKYVPPVGAKKLAGRRDVLDAAEKKYPYSINDPPSLTSSRDSRSRSPSFPLSPSAVAMSSSPFPPLGPPSHSSITSAPSMLQKITVMKDALLDKTQTPIIAMWKDGSVILPNKPARRLSYPDPVQGAPHEGFNLLSQWRMWTDDFSRQLETDEYPISLMIKSETPFESFRVGMLGPDDERLIFDVEGAVIRDEITGELLAGVITCRDITRIEHEISQIKAADEERFRLICETMPQLVWTAGPDGAHDFYNSRWYSYTGLSVEASLGGGWRTAFHPDDLAEADKRWQNSTRTGEPYVIEYRCRSKDGEWRWFLGRALPLKNKQTGEIEKWFGTCTDVHETMEAKLEAKRTRQQLRSVIAHSRMTMFAVDPNRKVTLLEGSLIWDALSPECGSSSWFIGKDVYEVFNNINQQLPDGQTPAFLQPLESILGGKSPVELQDHKFGRWYRTGFQPILRRDPLTGNSTEDFIEGVMGFIMDVTELKDRERDIEAQALEKRQLLANEAAAKEASRLKSQFLANMSHEIRTPITGVIGMAELLLDVELDAEQRELTENIFRSANALLTVINDILDFSKIESGRLDIEEVQFSLAVVIQEVGKMLSFTAERKSLAFNYEICSDIGIDLVVMGDPGRVRQIITNLATNSIKFTHEGHVKLHVSVEQETDDTIEVKFVIQDTGIGIEEEVLKRLFQPFSQGDPSTARKFGGTGLGLTISKNLLELMKGRMALASKKDEGTTATFWIPFKKPQKAQSITGPLSDRLQSETSVSCNCPAPADQESGALSGEQRSAWRQSSTSLSPTTSQEELSMPDRSKIFILVVEDNEINQQIAIRTIRKLGFQVAAAWNGKEALEYLSKASTGKTRKPDIILMDVQMPLIDGYLCTHLLRHHAPYRSYVRDVPIVAMTASAIQGDKEKCKRAGMDDYLSKPVKRTTLERMLLRWCTTKREELSPITSQCTESGEHCQSAGIPAVGLNEEPSELDLNAYDNVDDHEGSNLATPMGPGRVAEGMSPGGGAEIEQSPTAGYFSSGSGSGHGVPDATKPTGDPGEQTGLGQAEQLLDASSQHYPSQPSVADMTTSPASIERREGEALTEENLGKLQEEQNEELQSI

SEQ ID NO: 9599 - protein, 206 aa, Zea mays
MASRRRTLLKVIILGDSGVGKTSLMNQYVNKKFSNQYKATIGADFLTKEVQFEDRLFTLQIWDTAGQERFQSLGVAFYRGADCCVLVYDVNSMKSFDNLNNWREEFLIQASPSDPDNFPFVLLGNKVDVDGGNSRVVSEKKAKAWCASKGNIPYFETSAKDGTNVEDAFQCIVKNALKNEPEEELYVPDTVDVAGGNRAQRSSGCC

SEQ ID NO: 9600 - protein, 328 aa, Archaeoglobus fulgidus DSM 4304
MIEIDGSFGEGGGQILRTAVALSCVTGKAVRIRNIRANRPKPGLAAQHLKGIEAAKIISNAEVEGLRIGSTEIVFNPGSVRGGNFRVDIGTAGSVTLIFQTVLLPLLFADRDSTLTVTGGTDVAWAPPVDYFKNVTLRALREMGAECELEVLKRGYYPKGGGMVRLTVRPAEMKGVVYERIDEIVRGVSHCQNLPGHVAERQASSARNFLEERGIRAEIRTEVLKGLSTGSGIVLWSGYKGGSALGERGKRAEVVGQEAAESLYRELMSDAAFDAHLADQVMPFAAMARGRTEYTTSEVTMHQKSNAYVINTFLGKVVKFEGNKIIIK

SEQ ID NO: 9601 - protein, 152 aa, Oryza sativa (japonica cultivar-group)
WGGEGAGQVLPIANISRIMKKAIPANGKIAKDAKETVQECVSEFISFITSEASDKCQREKRKTINGDDLLWAMATLGFEDYIEPLKVYLQKYREMEGDSKLTAKAGDGSVKKDVLGSHGGSSSSAQGMGQQAAYNQGMGYMQPQYHNGDVSN

SEQ ID NO: 9602 - protein, 195 aa, Morus alba
GFFEVTHDISNLTCADFLRAPGVQTPVIVRFSTVIHERGSPETLRDPRGFAVKFYTREGNFDLVGNNFPVFFIRDGIKFPDMVHALKPNPKSHIQEFWRILDFFSHHPESLHMFTFLFDDIGVPQDYRHMDGSGVNTYTLIDKAGKAHYVKFHWKPTCGVKSLLEDEAIRVGGANHSHATQDLYDSIAAGNYPEW

SEQ ID NO: 9603 - protein, 509 aa, Oryza sativa (japonica cultivar-group)
MEGNARGGGHSEALKNYNLGRTLGIGSFGKVKIAEHKLTGHRVAIKILNRRQMRNMEMEEKAKREIKILRLFIHPHIIRLYEVIYTPTDIYVVMEYCKFGELFDYIVEKGRLQEDEARRIFQQIISGVEYCHRNMVVHRDLKPENLLLDSKYNVKLADFGLSNVMHDGHFLKTSCGSPNYAAPEVISGKLYAGPEVDVWSCGVILYALLCGTLPFDDENIPNLFKKIKGGIYTLPSHLSALARDLIPRMLVVDPMKRITIREIREHQWFQIRLPRYLAVPPPDTAQQAKMIDEDTLQDVVNLGYEKDHVCESLRNRLQNEATVAYYLLLDNRFRATSGYLGADYQESLERNLNRFASSESASSNTRHYLPGSSDPHASGLRPHYPVERKWALGLQSRAQPREIMIEVLKALEDLNVCWKKNGQYNMKCRWSVGYPQATDMLDVNHSFVDDSIIMDNGDVNGRLPAVIKFEIQLYKSRDEKYLLDMQRVTGPQLLFLDFCAAFLTKLRVL

SEQ ID NO: 9604 - protein, 371 aa, Archaeoglobus fulgidus DSM 4304
MAIYAFPEFDGESRRASRIYASARYPSRQEGNVFFDSEEVPNLKYADEMPLKIRNFYSVVAFRPSHIFLSRDVLGGRPLYYGSDMSISSFKSYIDGEVYEVMPGEVVKMDYTGEILERRKYAFEDVFRVGREDVNEMADRILNSLSSYKPRVGCIAFSGGVDSSLLAALYDAPLVSVTASDAEEEWLKTAARMLGKEIEILKVGESAIREVVDTVRKTIETGDFLQLSIAVPVYLTMQFAKSLGFTEIIFGQGADELFGGYKRYEGLSEHELEDALVKDLKSIGESNLVRDCKLAYKNEIKLVTPYLCWDVIDAALKIPPEYKVRREGGKVVRKYILRKIAEKFLPEEIAWRDKKAIQYSTGIAKILKKCL

SEQ ID NO: 9605 - protein, 190 aa, Brassica napus
  misc_feature (132)..(132): Xaa can be any naturally occurring amino acid
  misc_feature (142)..(142): Xaa can be any naturally occurring amino acid
  misc_feature (158)..(158): Xaa can be any naturally occurring amino acid
DRIGVCKGIFRTANIKDEDIVTLGDQFPGQSIDFFGALRARVYDDEVRKFVEGLGVEKISKRLVNSREGPPVFEQPEMTLEKLMEYGNMLVMEQDNVKRVQLADQYLNEAALGDANADAIGRGTFFGKSAQXVNLPVPEGCXTDPAAKNFDPTARSDXDGTCVFQLLSFLLLIIKSSVFFFFCFCVIVNW

SEQ ID NO: 9606 - protein, 179 aa, Phaseolus vulgaris
GLHYPATDIPQASRFLFMKNKVRMIVDCYAKHVKVLQDEKLPFDLTLCGSTLRAPHSCHAQYMANMDSIASLVMAVVVNDNEEDGDTDAVQPQKRKRLWGLVVCHNTTPRFVPFPLRYACEFLAQVFAIHVNKEIELEYQIIEKNILRTQTLLCDMLMRDAPLGIVSQSPNIMDLVKCD

SEQ ID NO: 9607 - protein, 242 aa, Corylus avellana
MEFQNQSMSVSPQRKLGRGKIEIKRIENTTNRQVTFCKRRNGLLKKAYELSVLCDAEIALIVFSSRGRLYEYANNSSVKTTIERYKKACADSSNSGSVSEANTQFYQQEAAKLRGQIRSVQDSNRHMLGEALSELNFKELKNLEKNLEKGINRIRSKKNELLLAEIEYMHKREVDLHNNNQFLRAKIAENERNQQNLNVMPGGGNYELMQSQSFDSRNYFQVDALQPNHHYPRQDQMALQLV

SEQ ID NO: 9608 - protein, 404 aa, Aspergillus nidulans FGSC A4
MASQVQPGQKPKVQPCRYKTGKTLGAGSYSVVKECVHIDTGQYYAAKVINKRLMVGREHMVRNEIAILKQVSTGHQNILTLVDYFETMNNLYLVTDLALGGELFDRICRKGSYYESDAADLVRAILSAVAYLHDHGIVHRDLKPENLLFRTPEDNADLLIADFGLSRIMDEEQLHVLTTTCGTPGYMAPEIFDKSGHGKPVDIWAIGVITYFMLCGYTPFDRETNLEEVQAIATANFSFTPVEYWRGVSQEARDFIKRCLTVNPKKRMTAHQALQHPWINPPYDTTDDLGSGEDLLPNIKKNFNARRTLHKAIDTVRAINKLRENGGLMMDGIMSVDPKPEHVNGSEVVEDRTTPRERENEDAMEIDSRSNARGQTEQQIREQERKVKETVAGLWSRTAPRSER

SEQ ID NO: 9609 - protein, 492 aa, Oryza sativa
MDPYKGRPSSSFNGPLWSTNSGAPVWNNNNSLTVGSRGPILLEDYHLVEKLANFDRERIPERVVHARGASAKGFFEVTHDITHLTCADFLRAPGVQTPVIVRFSTVIHERGSPETLRDPRGFAIKFYTREGNWDLVGNNFPVFFIRDGMKFPDMVHSLKPNPKSHVQENWRILDFLSHHPESLHMFTFLFDDIGIPADYRHMDGSGVNTYTLVNRAGKSHYVKFHWKPTCGVKSLLDDEAVTVGGTNHSHATQDLYDSIAAGNFPEWKLFIQTIDPDHEDRFDFDPLDVTKTWPEDIVPLQPVGRMVLNRNIDNFFSENEQLAFCPGSSCRGSTTPTTSCCRRGSSPTPTRSATGWDQNYLVVPANAPKCAHHNNHYDGFMNFMHRDEEVDYFPSRYDPAKHAPRYPIPSATLTGRREKVVIAKENNFKQPGERYRSWDPARQDRFIKRWIDALSDPRLTHEIRSIWLSYWSQADRSLGQKLASRLSAKPSM

SEQ ID NO: 9610 - protein, 336 aa, Pennisetum glaucum
MRMLSKACSLVASSLPRCSSSAAPTIRGQPSLLPSVRKEWLDKPLLYGIGTLLVMPLTTLHGVGRMFGAGRFLCNMTSVSSSLQIELVPCLQDNYAYILHDVDTGTVGVVDPSEATPIINALEKRNQNLTYILNTHHHYDHTGGNLELKAKYGAKVIGSAKDRDRIPGIDITLSEGDTWMFAGHQVLVMETPGHTSGHVCYHFPGSGAIFTGDTLFSLSCGKLFEGTPQQMYSSLQKIIALPDETRVYCGHEYTLSNSKFALSIEPGNKDLQEYAANAADLRKRNTPTVPTTIGREKQCNPFLRTSSPEIKNTLSIPDHFDDARVLEVVRRAKDNF

SEQ ID NO: 9611 - protein, 413 aa, Arabidopsis thaliana
MASSSADNLTDKNIVFRKLKSKSENKVCFDCSAKNPTWASVTYGIFLCIDCSATHRNLGVHISFVRSTNLDSWSPEQLRTMMFGGNNRAQVFFKQHGWTDGGKIEAKYTSRAADLYRQILAKEVAKAIAEETNSGLLSSPVATSQLPEVSNGVSSYSVKEELPLSKHEATSATSSPKASNTVVPSTFKKPIGAKRTGKTGGLGARKLTTKPKDNLYEQKPEEVAPVIPAVSSTNNGESKSSAGSSFASRFEYNDDLQSGGQSVGGTQVLNHVAPPKSSSFFSDFGMDSSFPKKSSSNSSKSQVEESDEARKKFTNAKSISSAQYFGDQNKNADLESKATLQKFAGSASISSADFYGHDQDDSNIDITASDLINRLSFQAQQDLSSLVNIAGETKKKLGTLASGIFSDIQDRML

SEQ ID NO: 9612 - protein, 234 aa, Asparagus virgatus
MGRGKIEIKRIENTTNRQVTFCKRRNGLLKKAYELSVLCDAEVALIVFSSRGRLYEYANNSIKSTIERYKKACADSSNSNAVIEVNSQQYYQQEAAKLRHQIQILQNANRHLMGDSLSSLTVKELKQLENRLERGITRIRSKKHELLFAEIEYMQKREAELQNDNMYLRAKISENERAHQVSVVQPGPEFDTLPTFDSRNYYNVHMLEAAPHYSHHQDQTALHLGYENKADPAA

SEQ ID NO: 9613 - protein, 149 aa, Oryza sativa (japonica cultivar-group)
MSLVRRSNVFDPFADFWDPFDGVLRSLVPATSDRDTAAFANARVDWKETPESHVFKADLPGVKKEEVKVEVEEGNVLVISGQRSKEKEDKNDKWHRVERSSGQFMRRFRLPENAKVDQVKASMENGVLTVTVPKAEVNKPEVKAIEISG

SEQ ID NO: 9614 - protein, 140 aa, Arabidopsis thaliana
  misc_feature (74)..(74): Xaa can be any naturally occurring amino acid
  misc_feature (95)..(95): Xaa can be any naturally occurring amino acid
MGGIKWTNWSSKGFFFGGQFNRQNLGFKKLKIKSWNQGWFRLWAKNPTWALGTYGNFLWIGWSATHRESGVHIXSFVRSTKLDSWSPEQLRTMMXFGGNNRAQVFFKQHGWTDGGKIEAKYTSRAADLYRQILAKRSAKA

SEQ ID NO: 9615 - protein, 292 aa, Zea mays
FCFALQFRPSSSHDTTVTTTNAGAPVWNDNEALTVGPRGPILLEDYHLIEKVAHFARERIPERVVHARGASAKGFFECTHDVTSLTCADFLRAPGVRTPVIVRFSTVIHERGSPETIRDPRGFAVKFYTREGNWDLLGNNFPVFFIRDGIKFPDVIHAFKPNPRSHVQEYWRVFDFLSHLPESLHTLFFLFDDVGVPSDYRHMEGFGVNTYTFVSAAEKATIRKPNDFKQPGERYRSWDADRQDRFVRRFADSLGHPKVSQELRSIWIDLLAKCDASLGMKIATRLNMKPNM

SEQ ID NO: 9616 - protein, 188 aa, Zea mays
KITPRTRGIVIINPNNPTGAVYSKELLLEIVEIARQHNLIIFADEIYDKILYDEAQHHSIAALAPDLLTVTFNGLSKTYRVAGFRQGWMVLNGPKKHAKGYIEGLEMLASMRLCANVPAQHAIQTALGGYQSISEFIAPGGRLFEQRQRAWELINDIPGVSCVKPQGALYMFPRIDAKKFNIMDDQKM

SEQ ID NO: 9617 - protein, 84 aa, Hordeum vulgare subsp. vulgare
DDVGIPLNYRHMDGFGVNTYTLISRDGKAHLVKFHWKPTCGVKCLLDDEAVTVGGTCHTHATKDLTDSIAAGNYPEWKLFIQTI

SEQ ID NO: 9618 - protein, 447 aa, Arabidopsis thaliana
MSQHMNLLLPSFETDKEEYDERKTTDHGGIGGSVWRFKGNKAAKEAASVSMKGTLARLFDCCSKDVKKTILPLGHGDPSVYPCFQTSVDAEEAVVESLRSGAANSYAPGVGILPARRAVANYLNRDLPHKIHSDDIFMTVGCCQGIETMIHALAGPKANILLPTLIYPLYNSHAIHSLVEIRKYNLLPDLDWEIDLQGVEAMADENTIAVVIMNPHNPCGNVYTYEHLKKVAEVARKLGIMVISDEVYNQTIYGENKFVPMGIFSSITPVVTLGSISKGWLVPGWRIGWIAMNDPKNVFKTTRVVESIKEHLDISPDPSTILQFALPNILEKTKKEFFEKNNSILSQNVDFAFDALKDIPCLTCPKKPESCTYLVTKLDLSLLEDITNDFDFCMKLAQEENLVFLPGEVLGLKNWVRFSIGVERSMLEDAFMRLKGFFARHTKTQLT

SEQ ID NO: 9619 - protein, 558 aa, Bradyrhizobium sp. BTAi1
MFAAATRSASVRLRPRAIGVERLRRGLAAGLSRSCDVAAQRREILPDRGGRIALDAAVPFDQLRAERGQRRAAAILAAGLPRHRRLPAHPVDLVDEVPGALVGHVHGAAGRRDRAVLLDMLQQRDLARPDAAAVIEVDAQAEGGKGVRFRHGGSARTEVGRTLPPSCFANKMTAIDNHNDSGGEMLPALFSPLTIGPYHLKHRVVMAPLTRMRADRATLAPRQLNVDYYAQRATPGGLIIAEASPVLPTGTGSPNVPGIYSAAQVAGWKQIVDAVHAKGGLIFLQLWHVGRVSHSSFQPGGALPVAPSAIAIGDDLKAMTADGKAAAYETPRALATEEIPGLVAAYGQAARNAMAAGFDGVEVHGANGYLIEQFLQTRSNQRTDRYGGSIENRCRFLLEVTEAVIDACGAGKVGVRLSPYGIANGSGEAEPMPLYTYAIEALNKLGIAYLHLIEPRSSGAGRADVNWQNVPSAIQLFRPVWKGVLIGAGGFTGEPAEAAIKAGHADAIAFGRYFISNPDLPTRLQHGWPLTPYHRPTFYGGEEKGYTDYPVYDATVTA

SEQ ID NO: 9620 - protein, 528 aa, Kluyveromyces lactis NRRL Y-1140
MLSVRVNLKTRISSGMIRVNAPALKSTMPSVTSLTQLRFSTTVKPAPKLSLDDVNENVLKAKYAVRGRIPMRAEELRDQLKKDPSSLPFSKIISANIGNPQQLDQKPLTFYREVLSLLQHPELLEEADEALQTLYKTDSIKRAKRLLSEVGGSVGAYSQSQGVQGIRETVADFITKRDDGEISYPEDIYLTAGASAAVSYILSILCKGPNTGVLIPIPQYPLYTASLALNNSRPLPYYLREEQNWSTDPEEIEQVVLDAIQKGIKPTCLVVINPGNPTGAILSEQSIQKIFEVAAKYGIVVIADEVYQENVFKGSKFYSMKKVLRNLQKTYHGQYDNIQLASLHSTSKGVSGECGQRGGYMELVGFNHDIRQVFLKLASISLCPVVTGQALVDLMVSPPQPGDESYEQDQQEREDIHDALDERASKLFETFSRLEGIECRKPQGAMYLYPKLDLPYKVIQEAQHLEMEPDEFYCKALLENTGICTVPGSGFGQVPGTYHLRTTFLPPGTEWVETWEKFHKAFFDKYRD

SEQ ID NO: 9621 - protein, 416 aa, Vibrio sp. Ex25
MDELICLYCRPSVTPYLQHFAQETSLGRAKLQFLEASLNELNQSLAKLGQRLWTVELTPYQAIKYAISHFGITHIYADAFAGSDEQQALERAIKGTPHVNIKQQAIRTLLREEQLPFELRQLPATFTKFRKQVEGLDLSQPYESVHALPPVPSGMNFPTATTYYFDTKPVFDGGELSGLEHCRRYFASSLASEYKQTRNELDGMEYSTKFSPWLAHGCVSPTIIYAMLKQYEQKNGANDSTYWIYFELLWREYFYWYARKYQQKLFRFGGIANQPPLTSFYAQRFKQWKKGETPFPIVNACMHQLNKTGYMSNRGRQLVASCLVHELGLDWRYGAAYFETQLIDYDVGSNWGNWQYLAGVGADPRGSRQFNLEKQTQTYDPDFSFIDKWQGRCVGVHLDSVDMVDWPIASKKESGR

SEQ ID NO: 9622 - protein, 366 aa, Xanthomonas axonopodis pv. citri str. 306
MLMSKSTQSPLFSPVRLGALDLANRVIMAPLTRNRAVAGQVPSPLAAEYYGQRATAGLIVAEGTQISPLGQGYLDTPGIHTRQQIEGWRAVTDEVHRRGGKIVLQLWHVGRVSHTSVLPPGEVPVAPSAIRAEGKTFTPNGFEDVSEPRALALDEIPGLIEDYRIAARNAIDAGFDGVEVHAANGYLLDQFLRDSSNKRTDAYGGDIENRTRLLAEVVQAIADEIGAERTGVRLSPVTPVYGAHDSDPQPLFERAVERLNLIGGLAFVHVIEGATGGPRDNIAFDYAALRAKFDGAWIANNGYDRGMSEHAISSGYADAIAYGRPFIANPDLVRRLRENAPLAELDQATMYGGGAKGYTDYPALPE

SEQ ID NO: 9623 - protein, 487 aa, Kineococcus radiotolerans SRS30216
MTTTEERSTTPAPSAAERTFPPGFVWGTATASYQVEGAVAEDGRTPSIWDTFSHTPGRVVAGDTGDVADDHYHRFREDIALMKRLGMASYRFSVAWPRITPQVSADELGPVNPAGLAFYSTLVDELIAAGIEPAVTLYHWDLPQALEDAGGWTARTTAERFAEYAEVVAGALGDRVRTFITLNEPWCSAYLGYASGVHAPGRTEPASALAAVHHLNLAHGLGAAAVRRAAPGARVALTLNLAWVRTEGTSEADADAVRRVDGLQNRVFLDPVLRGTYPADVQADTSSVTDWSFVREGDLALIHQPLDVLGVNYYSPTVVRAWDGSAPRAENDGHGNSAHSPWVASTDVEFPELPGEKTAMGWSIDPRGMTELLLRIHREHPGLELLVTENGAAYDDVVVAGQVHDVERTRYLRDHLAAVLDAVEAGAPVTGYYLWSFLDNFEWGYGFSKRFGVVHVDYATQERTVKDSALWYADVVSRNALPAADAD

SEQ ID NO: 9624 - protein, 453 aa, Thermoanaerobacter tengcongensis MB4
MRKFSIRIFTLLLVFFLAFTSYTYAEVSTQDQDLYNELADIGAIMKYITDNYIDNVTYEQLKEAALKGIFSSLDEYSTYFTKEEFSQFERGTSGTFSGTGMVLIEKDGKIVVDSVIEDSPAAKAGVKSGYIIKTVDGKSVEGMKLTDVVNMILGDPGTKVKITFDVGGTLKEIELVRQVIHINPVSYKLLEEGIGYIKITEFNENTTANLTKALLFMDKNNVKKLILDLRNNPGGLLTEVVSAANFFVPQGIVVTIERRNGEKEDYYSYLTKPKYKLAVLVNKGTASAAEILAGAIQDTKVGFLVGENTYGKGTVQSVVPLEDGSGFKLTIARYKLPSGRYIGKEGLTPDVYVKNVQYTADIKFGGELKIGSRGNEVKILQKYLNLLKFNAGPEDGIFGPKTANAVKELQKKAGLSPTGVFDKNTYNALLKMIDSLNNKDAVLEKALELLRNM

SEQ ID NO: 9625 - protein, 379 aa, Idiomarina loihiensis L2TR
MQKISEKPPIIWLNTLVFSITFIVAIVGVPLYAYSVGIGAAFWWVMLGTACFAGLSITAGYHRLWAHRTYDANPVIRFIFAIGGAVALQNSALHWSSDHREHHKHVDDNDKDPYSAKRGFWYSHIGWMIREYQASRYTDYDNVKDLQKDPIVMWQHKYYLPLTLFVNFGWPIAAGFMLGDVWAGLLVIGVLRLVLNHHTTFFINSLAHIWGKQPYTDKNTARDNGVLAFLTFGEGYHNYHHIFAADYRNGIRWWQFDPTKWLIVASKWLGLAKNLKRSSPYQVERAKLQMQLKRAQLKAQAAPESLFERAQEHYDQMGQQLKAYYQARKKLLDTKAKALKEHVHHDIDALKRQVDEMKASLEMQKRSWKALLNQIQQHA

SEQ ID NO: 9626 - protein, 175 aa, Mesorhizobium sp. BNC1
MAETATKLPVKSEKSVASPEGWAPFESLRREIDRLFDDFHPFGWRLPSRTAFDLEIPKFSRAAWQVAPAMDLVEKEKEYEITAELPGIDEKNVEIKLSNHTLTIKGEKKEEKEEKDKDYYLSERRYGSFQRSFRVPDGVDADKIEATFTKGVLTVRLPKTAQAQKADKKIEVKAA

SEQ ID NO: 9627 - protein, 922 aa, Aspergillus nidulans FGSC A4
MASAGPATADGGAGHSHAASGHHLHATNVQSKRRTMIATPTGQWSLGKTLGAGSMGKVKVGKHLETGEQVAIKIVPRQSTEEHRSQREAERADRSKEVRTAREAAIVSLVNHPYICGMRDVVRTNYHWYMLFELVNGGQMLDYIISHGKLKEKQARKFARQIASALDYCHRNSIVHRDLKIENILISKTGDIKIIDFGLSNLFSPRSLLKTFCGSLYFAAPELLQARQYTGPEVDVWSFGIVLYVLVCGKVPFDDQSMPKLHAKIKSGVFEYPPGLTAECRHIISRMLVTDPKQRASLTEIMNHPWMNKGFSGPPDNHLPHREPLQLPLDPEVIEKMTGFEFGKPEYITAQLTKIIESEEYQHAIALNAREHPVPAHTDKKRGVFDFYKRRNSASRDTLSAPSAEAVQLGNDPLNAYSPLLSVYYLVKEKLDRERSESNPGALSIAQAPGDMLQVPDLAPPEAAHTNQYQVPGEKDTGRRSRPRARTHGDDEITEGMKNASLAPNHAQASHSPAASQPDTPAKKESTAAGLLRRFSTRRTKDRSRDRERSRLASPHQPSLNVQPPADSASPLSRGFSMRKNRRTEPSATAIPSTGSQPQHQDLLKTPGSVEPASRSNKYLERSISVSSGEPRHRRSRRTEGDSGSQPPQTSGSEYSAVPKDSTAGREQKIAPRTHASRTMSLGHARRESIQARRARRDAAREANVPEETDGEISGPGAALESANEEDLSKPVYLKGLFSVSTTSSKPLAFIRADIIRVLKQLAVDYVEIKGGFSCRHAPSIELDKVVDNGPPSPERQGQVSNHRRRISLGGLLNHDDGREELARTTTRRRHRAPDRSFVSNSEVSDEYLETRDTTVTSGERVVGETTTRVQSDTGGNLVLRFEILIVKVPLFSLHGIQFKKVSGGMWQYREMAKKILDALRL

SEQ ID NO: 9628 - protein, 375 aa, Lithospermum erythrorhizon
MGNTEKHEETPKMPLLSPYKMAKFQLSHRIVLAPLTRQRSFGNVPQKHAILYYSQRTTRGGLLIAEATGVSDTAQGYPNTPGIWTKEQVEAWKPIVEAVHAKGGIFFCQIWHVGRVSHQNSQPNGQAPFSSTDKPLTSQIRSNGIDVAEFTPPRRLRTDEIPEIINDFRLAARNAIEAGFDGVEIHGAHGYLVDQFLKDQINDRTDQYGGSLENRCRFALELVEAVATEIGADRVGIRLSPYANYMESGDSNPTALGLYMAGALNKYGILYCHMVEPRMKTVGEKTESPYSLMPMRKAFKGTFLVAGGYGKDDGNQAITEGRADLVVYGRIFLANPDLPKRFELDAPLNKYNRETFYIPDPVVGYTDYPFLEDTA

SEQ ID NO: 9629 - protein, 472 aa, Solibacter usitatus Ellin6076
MISGRSLTVAARISEPRQTSEPRPLGSVRLWSRAALLILAAVSCASANDLRLVEALKRRDHKAVTALLAQHADVNAAQPDGATALFWATYLDDRESAELLLAAGAKVEVADEYGETPLTLAAGNGDAPLVAKLLKAGANPSAARWDGETALMIAASAGSVDTVKQLIAAGADVNLAESRKGQTALMWAAAEGHPDVVQYLIDHKAEVNAASKSGFTALVFAAIKDDPKSVQKLLAAGADPNFALPDGAKVLLIAAVHKSPHAAAALADGGADPNIADKGGNTPLHTAARAGDVDLIKKLIEKGANPNARTAKVAPGGRGGGGFRFITGEQTPLMLAAKANKIEAMRALIAGGADPKLKAQDGSTFLMSAVGSGHIEAVQYAYELDPDVKAVSSTGATVMHSSVTGSMQNSTQPEICKVIQFLADKGAALDERDARGRTPIDVADTLPIDKAVELLTELIIKSGATPKKPSRR

SEQ ID NO: 9630 - protein, 125 aa, Taraxacum officinale
NPEALGLYMAESLNQYRIAYCHMVEPRMKKSVGEKIETPHTLVPMRKAFKGTFISAGGFAMEDGNKAVAEDRTDLVAFGRLFLANPDLPKRFELKAPLNKYDRETFYLPDPVIGYTDYPFLETNV

SEQ ID NO: 9631 - protein, 311 aa, Oryza sativa
MRMLSKACSLVASSLPRCSSSAAPTIRGQPSLLPSVRKEWLGKPLLYGIGTLLVMPLRTLHGVGRMFGAGRFLCNMTSVSSSLQIELVPCLQDNYAYILHDVDTGTVGVVDPSEATPIINALEKRNQNLTYILNTHHHYDHTGGNLELKAKYGAKVIGSAKDRDRIPGIDITLSEGDTWMFAGHQVLVMETPGHTSGHVCYHFPGSGAIFTGDTLFSLSCGKLFEGTPQQSNSKFALSIEPGNKDLQEYAANAADLRKRNTPTVPTTIGREKQCNPFLRTSSPEIKNTLSIPDHFDDARVLEVVRRAKDNF

SEQ ID NO: 9632 - protein, 197 aa, Brassica napus
  misc_feature (143)..(143): Xaa can be any naturally occurring amino acid
MCGILAVLGCTDDSQAKRVRVLELSRRLRHRGPDWSGIYQHGDNYLAHERLAIVDPDSGDQPLFNEDKTIVVTVNGEIYNHEELRKDLKNHKFRTGSDCDVISHLYEEHGENFVDMLDGVFSFVLLDTRDNSFMVARDAIGVXSLYIGWGLDGSVWISSEMKGLHEDCEHFEVFPPGVLYSSKSGGFKQWYNPPWYN

SEQ ID NO: 9633 - protein, 482 aa, Pseudomonas syringae pv. phaseolicola 1448A
MQLIWLRSDLRVHDNTALTAAMERGPTLAVYLLSPAQWRSHDDADCKVDFWLRNLVELEKALGALNVPLLIREADTWDQAPEVLSTLCTQLKIEGLHLNQEYGINETRRDQAVQKALEKAGVQVTSYLDQLLFKPGSILTKTGNYFQVFTQFKKVCYNRMHQAMPQPVRTPKAQQSLSIKSDSIPDQVEGFATPSKALRDLWPAGEAEARRRMATFADAQISYYKTERDFPAKPGTSQLSAYLAAGVISPRQCLHAALGSNQGEFETGDVGTVTWINELLWREFYKHTLVGYPRVSRHRAFRPETEALKWRDAPEELLAWQEARTGLPIIDAAMRQLLETGWMHNRLRMVVAMFLTKNLLIDWHEGERFFMRHLIDGDLASNNGGWQWSSSTGTDSAPYFRIFNPLSQSERFDPEGVFIKRWLPELADLNKKQIHDPASIGGLFGAADYPKPIVDLSKSRARALAAFKALPARQPAAGIEHD

SEQ ID NO: 9634 - protein, 131 aa, Hordeum vulgare subsp. vulgare
PNLLELEAPIKICGDIHGQYSDLLRLFEYGGFPPEANYLFLGDYVDRGKQSLETICLLLAYKIKYPENFFLLRGNHECASINRIYGFYDECKRRFNVRLWKVFTDCFNCLPVAALIDDKILCMHGGLSPDL

SEQ ID NO: 9635 - protein, 172 aa, Aspergillus nidulans FGSC A4
MALLRTSRPSRLESFIFSSFLLSSSFSLLSIRTISDPTWVSDLSSLTYYFIPSDIFRLRMSRKLAPEANRILFVKNLNYNVTAEQLFDLFGKFGPIRQIRQGIANNSKGTAFVVYEDVHDAKQACDKLNGFNFQNRYLVVLYHQPEKMLKSKEDLAERQENLERLKQQHGIE

SEQ ID NO: 9636 - protein, 745 aa, Shewanella sp. ANA-3
MMTQAQTYFYDGSDVALLNGQYTDVFSLLGMHSINEGKALVVRCFLRNAQKVDVISLKDGRKVASLERVNEAGLFAGTLGRRVKPFLYALRVVYPLCELDIIDPYQFGSLLDSQDLYLFGEGSSEQAYRFLGANWRHVDNVEGVHFCVWAPNAKRVSVVGDFNHWDDTRHVMRQHMANGLWEIFLPDVAQGAHYKFDLVYQNGERHAKSDPMATQMECAPHNASIVPKKHQHPWADTQWMHKRATTAWHRAAMSIYEVQLGSWRRKGEFGEQYFDYQDLIEQLIPYVKEQGFTHIELMPVSEYPFDGSWGYQPVGLYAPTHRFGDANGLKAFIDACHQAEIGVLLDWVAAHFPKDPHGLVRFDGTCLYEHEDPRKGTHPDWDTLIYNYDRGEVRSFLLSNACYWLREFHLDGLRLDAVSSMLYLDYSREPGQWLPNAYGGRENLEAIHFLQMLNQRLYQAFPGICMIAEESTAFAGVTKPTDCGGLGFGFKWNMGWMNDSLSYLGRDPIYRQYHHNQLTFSLMYAYSEQFMLSISHDEVVHGKGSLLHKIPGDDWQKFATLRAYYGFMWGHPGKKLLFMGGEFAQRDEWNHNHSLDWHLLAFEPHQGVQRWLRDLNWLYRQFPALSVLDYESQGFRWLDCDNGRDSIFSFVRYGEGSDVPLVFVVNMTPTLHQGFRIGLPQGGDFCEYLNSDSHLYGGSNQGNAGKVIAEDLPWQGMASSALITVPPLGCLILGPATDAPRDTSL

SEQ ID NO: 9637 - protein, 438 aa, Zea mays
MAEKENILMQRYEMGKLLGKGSFAKVYHARNVKTSESVAIKVIDKDKIKKCGLMDQIIQEISVMKLVKHPNIVQLYEVMATKTKIYFVIEYVKGGELFKKVQRGRLKEDVARTYFQQLISAVDFCHTRQVYHRDLKPENLLLDGSHNLKISDFGLSALPNCKRKDGLLHTICGTPAYVAPEVISQKGYDGAKADIWACGVILYVLLAGYLPFQDKNMMDMYKKICKAELKWPSWFSSDVRKLLRRILHPNPNRRISIEEIRTHPWFRIGLDARLFDSTTRDYVPSDMDLALNSLNSNMVECNSAAEKLTILNAFDIISLSNGFDLSGIFENSNKESKFMSTNTAMTIITKLMEVAKSLDLKVITKTGGLLNMEAAKSGIKGVMSINAEIFQITPNYHLVEIKKINGDILEYHNFMNQSMRPALEDIVWAWHGEQPDEK

SEQ ID NO: 9638 - protein, 640 aa, Thermoanaerobacter tengcongensis MB4
MELTKPIKLGGIELKNRLVMAPVKTGYATVEGQVTEELIGYYLNRAKGGVGLIVLESAYVDPSGKEIPRQLGIYDDSLVDGLKRLVTPLQEAGSKVAVYINHAGRVANPMATKMPLIAPSAVMCPSIGVEPKAIEKEEIKKWQKAYVDAAIRAYKAGADFLEIQFGHGYLIHQFLSPHANKRQDEYGGSFENRIRFGIEILEEIRSELPGFPVIVRISAEEFVEDGWKLEDTIKLVKILEGKGVAAIDVSLGTMCEAAPITMQTLGTKKGLSWDYAEKIKREVNIPVIAVGRINSPDIAEEILSKGKADLVALGRPLVADPLFLDKAVSGRFKEIRRCLACHQGCFDELRGGRRFGCNINPAVGRSDEIEIPKAENPGKKVFIIGAGPAGLEAAYTAAVRGHKVTIYDENEELGGQLIAASMPPYKEELMGIVEYYKEVLPKLGVEIKLNHRVTAEEVAQWEADAIIFATGGEPIVLSIPGLKEYGYMTAAEVLKEGKETGQTVVIIGGGLIGMETADYLSEKGKKVMVIELLDEVARDMGVFEKNLLMKRLKERDVEIYVKTKLKEVNKSLVTETLEGERNLPLPDTIVLSVGMRPNRTLYEEVKKFVPEEKLYLIGDAKEVRKIVHAISEGRNVALTI

SEQ ID NO: 9639 - protein, 460 aa, Salmonella typhimurium LT2
MRYRFPDNFWWGSACSALQTEGDSLNGGKSQTTWDVWFERQPGRFHQGVGPAETSTFYRHWKQDIALLKQLKHNSFRTSLSWARLIPDGVGEVNPQAVSFYNHVIDELLAQGITPFITLFHFDMPMVMQEKGGWENRDVVEAFGRYAQTCFTLFGDRVKHWFTFNEPIVPVEGGYLYDFHYPNVVDFKRAATVAYHTVLAHSTAVRAWRAGRYDGEIGIVLNLTPSYPRSQHPADVQAAHHADLLFNRSFLDPVLKGEYPADLVALLKTYDQLPACQPGDRQLIADGKIDLLGINYYQPRRVKCRDTAVNPQAPFMPEWLFDYYDMPGRKMNPYRGWEIYAPGIYDIITNLRDNYGNPRCFISENGMGVENEQRFVQAGQIHDDYRIDFISEHLKWLHKGISEGCHCLGYHMWTFIDNWSWLNGYKNRYGFVQLDLATQTRTVKKSGEWFAATAEHNGFD

SEQ ID NO: 9640 - protein, 1115 aa, Ipomoea nil
MENYGKAVTFSSSATSNLNTGKAIAQYNADAKLMAEFEQSRESGKSFDYSRSVIHAPQNVTEEEMTAYLSRIQRGGLIQPFGCMLAIEEPSFKIVGFSENCFDLLGLKSGVEPPERMSLIGIDARTLFTLSSRASLAKAVASREISLLNPIWVHSKINQKPFYAVLHRIDVGIVIDLEPANSADPALLLAGAVQSQKLAVRAISRLQSLPGGDIGTLCDTVVEDVQKLTGYDRVMVYKFHDDSHGEVVSEIRRSDLEPYLGLHYPATDIPQAARFLFKQNRVRMICDCNAQPVKVLQCEELKQPLCLVNSTLRSPHGCHTKYMANMGSIASLVMAVVINSSESMKLWGLVVCHHTSPRYVPFPLRYACEFLMQAFSLQLYMELQLASQLAEKKILQTQTLLCDMLLRDAPFGIVTQTPSIMDLVRCDGAALYYNGKCWLLGVTPTETQVKDIAEWLLHNHGDSTGLSTDCLSDAGYPGAPLLGDAVSGMATARITSKDFLFWFRSHTAKEVKWGGAKHHPEDKDDGGRMHPRSSFIAFLEVVKSRSLPWEDSEINAIHSLQLIMRDSLQGIGENYMKSVSSPQQNDSDGVRFYELSSMALELVRLVETATVPIFGVDSSGLINGWNAKIAELTGLQANVAIGKYLIDDVTHEDSHETFKALMCRALQGEEDRNVEVKLLKFGNHPTKEVVYLVVNACTSRDYKNDIIGVCFVGQDITPEKAVMDKFVRLQGDYEAIIQSLNPLIPPIFASDENACCSEWNAAMERLTGLVKCEVIGKRLPGEIFGGLCRLKGQDALTKFMILLYQGISGHDTEKLSFGFFDRKGNFIDVFITANKRTDERGNIIGCFCFLQTMAVDHPQISARDIEDDRECLSTLKEFAYIQQQMKNPLNGIRFTHKLLEGTVTSDHQKQFLETSEACEKQILSIIENMDSGGIVDGNRVELKTEEFVIGNVIDAVVSQVMIPLKEKNLQLLHDIPDQIKSLPIYGDQIKLQLVLSDFLLSIVRHAPSPDGWVEIRVSPGLKLIQDGNVFIHIQFRMTHPGQGLPSALIEDMVRGGTRWTTQEGVVLHLSQKLVRMMNGHVHYVREQQKCYFLIDLDFKTQKPRSRESSMDTKAD

SEQ ID NO: 9641 - protein, 142 aa, Chlorobium tepidum TLS
MALTLYGKDPLKMFEDVFNERLTPFISSMGSMMAPAFKVDISEDEKAIYLSADIPGVKKEDVKVSIEDDVISISAERTQEEEEKKKNYHRVERSWGSLSRSFTIGDNVDSDNITANYDNGVLKVVIPKKEPEQKKSKEIAVS

SEQ ID NO: 9642 - protein, 129 aa, Schizosaccharomyces pombe
MWLSDLQKIGVGTTALGFLFMIMGIFMFFDGPLLSLGNLLLVFGFFMIAGFSKSVSFFLRKDRMLGSISFFSGLLLTLFHFPIIGFFVECLGFFNLFKVFYPLIISFLRTVPYIGPYIDRLTSYQQSPV

SEQ ID NO: 9643 - protein, 246 aa, Arabidopsis thaliana
MEGGASNEVAESSKKIGRGKIEIKRIENTTNRQVTFCKRRNGLLKKAYELSVLCDAEVALVIFSTRGRLYEYANNSVRGTIERYKKACSDAVNPPTITEANTQYYQQEASKLRRQIRDIQNLNRHILGESLGSLNFKELKNLESRLEKGISRVRSKKHEMLVAEIEYMQKREIELQNDNMYLRSKITERTGLQQQESSVIHQGTVYESGVTSSHQSGQYNRNYIAVNLLEPNQNSSNQDQPPLQLV

SEQ ID NO: 9644 - protein, 441 aa, Arabidopsis thaliana
DAIGITPLYIGWGLDGSVWFASEMKALSDDCEQFMCFPPGHIYSSKQGGLRRWYNPPWFSEVVPSTPYDPLVVRNTFEKAVIKRLMTDVPFGVLLSGGLDSSLVASVALRHLEKSEAACQWGSKLHTFCIGLKGSPDLKAGREVADYLGTRHHELHFTVQDGIDAIEEVIYHVETYDVTTIRASTPMFLMSRKIKSLGVKMVLSGEGSDEIFGGYLYFHKAPNKKEFHEETCRKIKALHQYDCLRANKSTSAWGVEARVPFLDKEFINVAMSIDPEWKMIRPDLGRIEKWVLRNAFDDEKNPYLPKHILYRQKEQFSDGVGYSWIDGLKDHANKHVSETMLMNASFVFPDNTPLTKEAYYYRTIFEKFFPKSAARATVPGGPSVACSTAKAVEWDAAWSQNLDPSGRAALGVHVSAYGEDKTEDSRPEKLQKLAEKTPAIV

SEQ ID NO: 9645 - protein, 492 aa, Glycine max
  misc_feature (193)..(193): Xaa can be any naturally occurring amino acid
MDPYKHRPSSAFNSPFWTTNSGAPIWNNNSSLTVGARGPILLEDYHLVEKLANFDRERIPERVVHARGASAKGFFEVTHDISHLTCADFLRAPGVQTPVIVRFSTVIHERGSPETLRDPRGFAVKFYTREGNFDLVGNNLPVFFVRDGMKFPDMVHALKPNPKNHIQENWRILDFFSHFPESLHMFTFLFDDXGVPQDYRHMDGFGVNTYTLINKAGKAVYVKFHWKTTSGIKCLLEEEAIKVGGANHSHATQDLHDSIAAGNYPEWKLFVQTIDPEHEDKFDFDPLDVTKTWPEDIIPLQPVGRLVLNKNIDNFFAENEQLAFCPAIVVPGVYYSDDKMLQTRIFSYADSQRHRLGPNYLQLPANAPKCAHHNNHHEGFMNFIHRDEEVNYFPSRYDPVRHAERFPIPPAICSGRREKCGIEKENNFKQPGERYRSWAPDRQDRFARRWVDALSDPRVTHEIRSVWISYWSQADRSLGQKIASHLSTRPNI

SEQ ID NO: 9646 - protein, 404 aa, Haemophilus somnus 2336
MRVFPKSDKLEHVCYDIRGPVHQEALRLEEEGKKILKLNIGNPAPFGFEAPDEILVDILRNLPAAQGYCDSKGLYSARKAIVQYYQSKNILSATVNDVYIGNGVSELITMSLQALLNDGDEVLIPMPDYPLWTAAATLAGGKAVHYLCDEQADWFPDVADIKSKVTSRTKAIVIINPNNPTGAVYSKELLLDIVEVARQNGLMIFADEIYDKILYDNAVHHHIAALAPDLLTVTFNGLSKSYRVAGFRQGWMILNGPKQQAKGYIEGLDMLASMRLCANHPMQHAIQTALGGYQSINEFILPGGRLLEQRNKAYELINQIPGLSCTKPMGALYMFPKIDTKKFNIYDDEKMVLDLLRQEKVLLVHGRGFNWQQPDHFRIVTLPYVNQIEDALGRLAKFLTHYRQ

SEQ ID NO: 9647 - protein, 575 aa, Bacteroides fragilis NCTC 9343
MSTKNSSRFTPVIIAISVVIGILIGTFYAKHFAGNRLGIINGSSNKLNALLRIVDDQYVDTVNMADLVEKAMPQILAELDPHSTYIPAQNLEEVTSELEGSFSGIGIQFTIQDDTIHVNSVIQGGPSEKVGLMAGDRIVMVDDSLFVGKKVTNERAMRTLKGPKGTQVKLGVKRATEKDLLNFTITRGDIPQNTIDAAYMLTDDFGYIQVSKFGRTTHVELLNAIALLNHKNCKGLIIDLRGNTGGYMEAAVRMVNEFLPEGKLIVYTEGRKYPRADEFANGTGSCQKMPVIVLIDEGSASASEIFTGAIQDNDRGMVVGRRSFGKGLVQQPIDFSDGSAIRLTIARYYTPSGRCIQRPYQNGKDRNYEMDWLTRYEHGEYFSKDSIKLDENLRYSTALGRPVYGGGGIMPDVFVPQDTTGVTSYLTEVLSKGLTIQFTFHYTDNNRDKLKKYEDEESLLNYLRRQGLVEQFIRYADSKGVKRRNILIQKSYKLLEKSIYGNIIYNMLGKEAYIQYLNQSDQTVKKAVELLESGEAFPKAPISVEPQKEEKKDGKKKTTAQVDSTGEEEILRLYA

SEQ ID NO: 9648 - protein, 1082 aa, Arabidopsis thaliana
MASSSADNLTDKNIVFRKLKSKSENKVCFDCSAKNPTWASVTYGIFLCIDCSATHRNLGVHISFVRSTNLDSWSPEQLRTMMFGGNNRAQVFFKQHGWTDGGKIEAKYTSRAADLYRQILAKEVAKAIAEETNSGLLSSPVATSQLPEVSNGVSSYSVKEELPLSKHEATSATSSPKASNTVVPSTFKKPIGAKRTGKTGGLGARKLTTKPKDNLYEQKPEEVAPVIPAVSSTNNGESKSSAGSSFASRFEYNDDLQSGGQSVGGTQVLNHVAPPKSSSFFSDFGMDSSFPKKSSSNSSKSQVEESDEARKKFTNAKSISSAQYFGDQNKNADLESKATLQKFAGSASISSADFYGHDQDDSNIDITASDLINRLSFQAQQDLSSLVNIAGETKKKLGTLASGIFSDIQDRMLEKKVRKKLCRKTSNESLALSSPNRDRSDDDDNNNNHDSVSIPPPIYDGYSSSSSDESQSVPSPPINLDHDDDECQIPIRNTSQALDDIDDDIWGDDDLPETRRPWTPNVSPGFGSDDDDDNDDDNSKNEPRKSLFYGFRQEPEPVTGVGAGLWNLGNSCFLNSVFQCFTHTVPLIESLLSFRYEVPCHCGNEFFCVIRAIRYHIEAALRPERCPIAPYFFFDNLNYFSPDFQRYQQEDAHEFLQAFLEKLEICGSDRTSFRGDITSQDVFSGRLISGLRCCNCDYVSETYEKSVGLSLEIEDVDTLGSALESFTRVEKLDEQLTCDNCNEKVSKEKQLLLDKLPLVATFHLKRFKNNGLYMEKIYKHVKIPLEIDLQPYMRNIQENEVSTKYHLYALVEHFGYSVAYGHYSSYVRSAPKIWHHFDDSKVTRIDEDMVLSQDSYILFYAREGTRWFSSVYEEMQPLVEASLLNSSPKSVLDSSTNGECLSEISYENGDKASKPCDSAGVCNQHVKTKEDFVSLSNDDVFLSAESSSGEESPMGELLDPLDPDDSYSPCTEKESDSCLAIERATIRDDFFPLLLDQNQESSTSSPKLQERTFEMQLLQMEETTKSQEPWKQPLSSISNIADSMEAEFVYGDLMKKPSPRARELLDQAISTNGSPPKKLKTT

SEQ ID NO: 9649 - protein, 236 aa, Escherichia coli O157:H7 EDL933
MGYRSFDTAAAYKNEEGVGKALKNASVNREELFITTKLWNDDHNRPREALLDSLKKLQLDYIDLYLMHWPVPAIDHYVEAWKGMIELQKEGLIKSIGVCNFQIHHLQRLIDETGVTPVINQIELHPLMQQRQLHAWNATHKIQTESWSPLAQGGKGVFDQKVIRDLADKYGKTPAQIVIRWHLDSGLVVIPKSVTPSRIAENFDVWDFRLDKDELGEIAKLDQGKRLGPDPDQFGG

SEQ ID NO: 9650 - protein, 590 aa, Bradyrhizobium sp. BTAi1
MCGICGEVRYSSPPLLHALSRMNDAMQARGPDAAGLYVQGGVALGHRRLSILDLSAAAQQPMIDAAFGLGIVFNGCIYNFRELRTELQAKGYRFFSDGDTEVILKSYHAWGKGCVQRFKGMFAFALWERDSGRVVLARDRLGIKPLYYAEGAGFFRFASSMPALLAAGDVDTSLDPTALHHFFSFHAAVPAPRTILNGVKKLAPATLLTIDPDGTQHRERYWSFNVGEQRPTDRAMSQEEWSDALLDEMTVAVDRRRVADVPVGVLLSGGLDSSLLVALLSKLGHQDIRTFSIGFDAVDEHSGDEFRYSDIIARTFGTDHEQIRIGGDRALEALPNAIAAMSEPMVSHDSVAFYLLSSEVAKRVKVVQSGQGADEVFGGYSWYPGFLAANDAVHQYQNAYFDWQHGDLRRLLAPDLLGDDVSLELVERFFADHAGVSAVDKVLQIDTEIMMVDDPVKRVDNMTMAFGLEARVPFLDHEVVELAARMPAELKVTHGGKHILKEAARRCVPAEVIDRPKGYFPVPSLRYLRGPFLAYVRDVLSDEKARSRGLYQRDFIDHMLQNPEAEMSPKGHSRLWQAGLLEAWLQTHGL

SEQ ID NO: 9651 - protein, 298 aa, Xanthomonas axonopodis pv. citri str. 306
MDSQTDEPLDEARADRIDWLRAVPFIALHLACLAVFWVGASWFAVGMAVALYALRMFALTGFYHRYFSHRAFKTSRVLQFVFAAIGATCVQRGPLWWAAHHRNHHRHTDTGRDPHSPAQHGFWWSHTGWFLTPRNFRTDWEVIPDLRRFAELRFLDRFDIVMPVLLALGLYLLGDWLAVAAPALKTSGAQLLVWGFVISTVALFHATFTINSLAHRFGSRRFDTRDDSRNNWLLALLTFGEGWHNNHHFFPGSARQGLRWWEYDMTWYGLTAMSWVGLVWDLKPMPKLLTQRAERVKR

SEQ ID NO: 9652 - protein, 109 aa, Glycine max
  misc_feature (28)..(28): Xaa can be any naturally occurring amino acid
  misc_feature (44)..(44): Xaa can be any naturally occurring amino acid
  misc_feature (80)..(81): Xaa can be any naturally occurring amino acid
EIFGGYLYFHKAPNKEEFHIETYHKIKXLHQYNYLRANKSTFTXNLEAHIPFLDKAFINTTISINPKSKIIKRNKRRIKXXILKRAFNNKEHPYLPKHILYRQKKQFSN

SEQ ID NO: 9653 - protein, 134 aa, Zea mays
MRKHRIVSLVAALLILLALAVSSTRNAQEDSMADNTGTLAGGIKDVPGNENDLHLQELARFAVDEHNKKANALLGFEKLVKAKTQVVAGTMYYLTIEVKDGEVKKLYEAKVWEKPWENFKELQEFKPVEECASA

SEQ ID NO: 9654 - protein, 370 aa, Burkholderia vietnamiensis G4
MTALFSPFTLRGVTLPNRIVISPMCQYSAERGEATDWHMIHLGHLALSGAGLLCIEATAVEPDGRITAGDLGLWDDATEAALAPVLAAIRKHSPVRVAMQLSHAGRKASSEVPWKGGQLVSVADGGWLPHAPSAVSHKDGETPPLALDTAGLNRIRDAFAAAAKRAARLGIDAIEVHAAHGYLLHQFLSPLANRRTDEYGGSRENRMRFPLEIFDIVRAAFPDDRPVGVRVSATDWVEGGWELDDTIAFAHALKQRGCDWIDVSSGGVSPLQKIPLSPGYQVPFAQAVKRAVGMPTVAVGLISEPAHANRLIEAGDADFVAMARAMLYDPRWPWHAAAELGAQVSAPPQYWRSQPREHKALFGDVAFGQR

SEQ ID NO: 9655 - protein, 206 aa, Triticum aestivum
  misc_feature (185)..(185): Xaa can be any naturally occurring amino acid
  misc_feature (199)..(199): Xaa can be any naturally occurring amino acid
MVAAAMQALFDQTDLSLSLSLAPTAAPALNKDDYLAICLAALAATGKGGQQQQDQASAWRPAPAPAQELRFSCAVCGKAFASYQALGGHKSSHRKPPPTGERCVVVAQASAGAGSEASAAASSGGSSGGPHQCTVCGRGFATGQALGGHKRCHYWDGTSVSMSMSVSVSASSSMLRNFDLNLLPXPENAGLKRWAEEEXEVQSPLP

SEQ ID NO: 9656 - protein, 353 aa, Cryptococcus neoformans var. neoformans JEC21
MSGLSYCPRVGGYLKLSRTPTFTILPIFNSLIMSAPTSFKLNTGASIPAIGLGTWQAKAGEVRQAVAHALKAGYRHIDGALCYQNEDEVGLGIKDSGVPRSEIFLTSKVWSSYHDRVEECLDTTLKSLQTDYLDLYLIHWPVRLAPNGTHPLFPVKPDGSRNLDWDWDQAKTWAQMEDVLKKGKAKAIGLSNAGIPIIEHIIKTGKVTPAVNQVELHPYCPQHALLKYCKEKGILLEAYSPLGSTSSPLHEDPDLLAVAKKHNVPTATVLISYQVNRGVVVLPKSVTPARIESNLKTIKLDEEDMNKLDKLAEGGKQTRFTAPPWGSDFGFPDWFGPGNKDAPEGARLLAGKA

SEQ ID NO: 9657 - protein, 229 aa, Glycine max
  misc_feature (138)..(138): Xaa can be any naturally occurring amino acid
SSRIGSSTRRQKGDNSSQLRSAPPRKKREMATETKVQELGGITDVHGAANSVEINNLARFAVEEQNKRENSVLEFVRVISAKQQVVAGVNYYITLEAKDGLIKNEYEAKVWVREWLNSKELLEFKPVNVSSTPIGGIXRVTANSLEIDILARFAVDQHNKKENANLEFVGVIRAKQQVVEGFIYYITLEAKDGETKNVYETKVWVRSWLNSKEVLEFKPISINPLSVSV

SEQ ID NO: 9658 - protein, 138 aa, Cryptococcus neoformans var. neoformans JEC21
MWLSDGQKIGIALVAFGIFFQFLGIILFFDGPFLALGNILFLSGLPLIIGLTKTFYFFSRREKWRGTLCFFGGIILVFAKRPIIGIIIEFVGFIGLFGSFFPVILQALRQTPFIGPILSLPYIRGAADRLAGVRQSAV

SEQ ID NO: 9659 - protein, 741 aa, Pseudomonas syringae pv. syringae B728a
MNAPDKTGTRRRAIPAAVDLDALIRAEHRDPFSILGPHGDGGSGQYVRAYLPAALSVRLLARDDGRELGEMEMSEVPGFFVGHLEHPQPYLLKINWAGGEQITEDPYSFGPLLGEMDLYLFAEGNHRDLSSCLGAQVTSVDGVDGVRFAVWAPNARRVSVVGSFNSWDGRRHPMRMRHPTGVWEIFVPRLQPGEVYKYEILGAHGILPLKSDPMALSTTLPPDTASKIAAPLQFEWNDQEWLQSRAGRHEVTAPLSIYELHAGSWQMEQVEDNQWRQYNWRELADRLIPYVKELGFTHIELMPIMEHPFGGSWGYQLLAQFAPTARYGSPEDFAFFVDACHRAEIGVILDWVPAHFPTDTHGLAQFDGTCLYEYADPKEGFHQDWNTLIYNLGRTEVHGFMLASALHWLKHYHIDGLRVDAVASMLYRDYSRNAGEWVTNRFGGRENLEAIDFLRHLNDVVALEAPGTMVIAEESTAWPGVSEPTQQGGLGFNYKWNMGWMHDSLQYMEEDPINRGHHHGKLSFSLVYAWSERFVLPISHDEVVHGKHSLIDKMPGDRWQKFANLRAYLSFMWTHPGKKLLFMGCEFGQWREWNHDRELDWYLMQYAEHVGVKNLVGDLNRLYREEKALHERDADPAGFQWLVGDDSANSVFAYLRWSNDGEPLLVVANMTPVPRLDYRLGAPMRGAWTELLNSDAETYAGSNFGNGGEVMTEAEPAHGMEDSLVLNLPPLAVLILKPKKD

SEQ ID NO: 9660 - protein, 462 aa, Bacillus clausii KSM-K16
MTTYLFPPDFWWGTAVSATQIEGAADRDGKGKNIWDHWYEIEPNRFFNEVGPAKTSQFYDRYKDDIALMKKLGHTSFRFSISWSRLIPAGNGAVNEKAVQFYDQVIDELLAAGITPFVNLFHFDMPMAMQKIGGFENREVAYAFARYAEICFTHFGDRVKTWFTHNEPIVPVEGGYLYEFHYPKVVDFKRAVQVGYHTMLSSALAIERYRRLGQGGKIGIILNLTPSYPRAEENERDVEAAKLADAFFNRSFLDPSVKGTFPQELVAILKQYGLMPHVEEGDKAVISGNTVDLLGVNYYQPRRVKAKETPIGDGPLMPGTFFDSYDMPGKKINPHRGWEIYEKGIYDLLMNIKDHYGNIECFISENGMGVEGEEKFRDEAGVIQDDYRIEFISNHLRWLHKALTEGANVKGYHLWTFMDNWSWTNAYKNRYGFVSVDLEKDGKRTVKKSGWWFKTVIENNGF

SEQ ID NO: 9661 - protein, 231 aa, Kluyveromyces lactis NRRL Y-1140
MKRYSVSYVEVWDGDRVLSSWYDSKDENNSKYGSTDKGRADQKAVFHRLIGDMVIRTVVNLPGNKVTKTSIDLIEGYDCYYTTAENNKVLICFVKEEVPKFLPLRLLSELKCLNNDNDEYLKSNIDNQLDKFHEELLSYRTEGQQTAASTEEELQNIIAIMNDNIDKFLQRQERISLLVDNTNQLNENSFKFQRKSSKIMRKMWWNNVKFYSIVIIVVLAIIVIVSLLLLH

SEQ ID NO: 9662 - protein, 185 aa, Zea mays
MAEAPASPGGGGGSHESGSPRGGGGGGSVREQDRFLPIANISRIMKKAIPANGKTIPANGKIAKDAKETVQECVSEFISFITSEASDKCQREKRKTINGDDLLWAMATLGFEDYIEPLKVYLQKYREMEGDSKLTAKSSDGSIKKDALGHVGASSSAAQGMGQQGAYNQGMGYMQPQYHNGDISN

SEQ ID NO: 9663 - protein, 1112 aa, Kluyveromyces lactis NRRL Y-1140
MNGNGITTLKGDTIGPWKLGSTLGVGSTGKVVMAYNETKGQQAAVKIISKSIFNAQGSTMIGGNDPDVLPYGIEREIIIMKLLNHPNVLRLYDVWETSKDLYMVLEYVEKGELFNLLVERGPLPENEAVRFFRQIIIGISYCHALGIVHRDLKPENLLLDHKFNVKLADFGMAALESKDKLLETSCGSPHYAAPEIVSGLPYHGFESDVWSCGVILYALLTGRLPFDEEDGNIRNLLLKVQSGKFEMPGDDEISSEAQDLIARILTVDPEQRIKTREILKHPLLRKYPSIKDSKSIRNLPREDTYLNPLSLEGGNQCVDETILQNLVVLWHGRNKEDIITKLMEPGANLEKTFYALLHRFKHDNYQDQLKQQELQKKQSVSSNSLMYVGSLPSPNKSDSPVTTPKKKRTSIIVASSSHKRPVSMQKLSSQHSSPVKNGSIGKRLSKTFPSNKRISQLVSNSSSPTPAAHKRVSRINDSAAPPVPKEMLRDYKRQSKRQSKRFSLLPNMKRGSITTKLIATYAKLSEDSEWEYIEKETKRTSQDFATLMDQIFEHEKYEQIRKEKEELERKVNEAREKEEAERKERERIEREEQERLEREERKRAERQKELQDQMEDEIAKLKAEYEAVQGSSDERNTANGRSVSAPIETDRTANKRDSTFGIKNDINELINTRNFSLQTRPVSRLDPGIIAAESRLSANLEDDQASKEKTILETIRRSKFLGSQFNLNVELEKAQKDLVSKERQEQLRKYSEQTAKYEVQKLPKNAKAVATLRDDEVEPRKLSEVKVPQFTRRSKHFSSSNKRFSVLSLYSTKTSFTNLVDHLKNDNYLEPLPGQPEYSSSKVAQEPEFMFETVEELDENSKLFEVPETEEGKLASAARKESTDARKQSTNDKDINLPSLPPLQVSHDVADENGALGLGIYQPNDQTQKPHKTMLIDESIDENISSTSDVSRTEVVKKPPLNDVVRKNNNERKPLEEITPKVENKRKISFFRKFSQGSEKKLGPESFDSQLKAGVSAPKMYKALDRLLNEWTNYGLKHVESSPNDFVISGKLTSDNILSLRSTGFKITVLPGEGNGSIIQFTKKSGSTKTFNRLVKEIEKILEKEKVLVFSF

SEQ ID NO: 9664 - protein, 545 aa, Methylococcus capsulatus str. Bath
MAAKEVKFSDDARTRMLRGVNILAHAVKVTLGPKGRNVVLEKSFGAPTVTKDGVSVAKEIELSDKFENMGAQMVKEVASQTSDVAGDGTTTATVLAQSILTEGLKAVAAGMNPMDLKRGIDKAVAAAVDEIHAMSVPCTDSNAIAQVGTISANADESIGKIIAEAMDKVGKEGVITVEDGSGLENQLDIVEGMQFDRGYLSPYFINNQQSMSAELENPFILINEKKISNIRELLPVLEGVAKAGRPLVIVAEDVEGEALATLVVNNMRGILKVAAVKAPGFGDRRKAMLEDIAVLTGGTVISEDIGLSLEKATLADLGTAKKVQITKENTTIIDGAGSSEAIQGRVAQIRKQIEDTTSDYDREKLQERLAKLAGGVAVIKVGAATEVEMKEKKARVEDALHATRAAVEEGIVPGGGVALIRALAKLRDLKGANHDQDVGISIARRAMEEPLRQIVANAGDEPSVVLNKVAEGAGNFGYNAATGEYGDMVAMGILDPAKVTRSALQNAASVASLMITTEAMVAEEPKEEAPMPGGMGGMGGMGDMM

SEQ ID NO: 9665 - protein, 205 aa, Volvox carteri
MSTKKRRVLKIIILGDSGVGKTSLMNQYVQKKFTKEYKATIGADFLTKEIEVDDKKVTMQIWDTAGQERFQSLGSAFYRGADCCMLVFDVNNAKSFDDLDNWRDEFIIQAGPSDPDNFPFVVLGNKIDEVGVNRQVTEKKAKAWCASKGSIPYFETSAKEDINVEAAFTCITRNALRNEKEEELFVPDAVDMNTSATQRKRGGCC

SEQ ID NO: 9666 - protein, 311 aa, Glycine max
MATHFVLNTGAKIPSVGLGTWQSDPGIVGEAVYAAVKAGYRHIDCARAYNNEKEVGLALKKLFEESVVKREDLFITSKLWCGHHAPEDVPEALGDSLDDLQLDYLDLYLIHWPFRVRKGTSIGNPENFLPPDIPATWGAMEKLHDAGKARAIGVSNFASKKLGDLLAVARIPPAVDQVECHPGWQQSKLHTFCQSAGVHLSAYSPLGSPGSTWMNGNVLKEPVVLSIAEKLGKTPAQVALRWNIQMGHSVLPKSVSEERIKQNLAVYDWSIPEDLLAKFSEIKQARLLMGNFIVNKDSVYKTHDELWDGEI

SEQ ID NO: 9667 - protein, 409 aa, Kluyveromyces lactis NRRL Y-1140
MVMPVKLEKSDQVAFWTPKQPEVGKFLRYFDGIERDAPLLFQPLTIRGMTISNRVGTSPMCTYSSENFEANKYHLVHYGSISSSGPGLVIVESSAIDQIGASSPNDLGLFTDEQAITHKENIVDWAHVHNIKIGVQLGHAGRKASLASPLNGELGVYVPNEEGGWLDKLVAPSTVPFDDSGVIPNELTLAQIEKTIKQYGISAKLAVEKAGYDFVEIHAGYGYLPCQFYTATANKRNDRYGGPFENRIKFLLEVIDEVRSSIPDSMPIFLRLCADENVEDPDGWKLNDTIRLLPFLVQHGVDVIDVCSGGLNSKEYGWDHPNFLPPREIAKRIKEAAHSKILVASTGGLQDGTTANSLLESNTVDILLIGRVYLKNSGIIWQLADDLGVQLEQAKQKAWIFDSEGHLKK

SEQ ID NO: 9668 - protein, 420 aa, Arabidopsis thaliana
MGENGAKRWNFGANEVVERSNSLTIRDYLNTLINCLDGGDVRPVIPLGHGDPSPFPSFRTDQAAVEAICDAVRSTKFNNYSSSSGVPVARKAVAEYLSSDLSYQISPNDVHITAGCVQAIEILISALAIPGANILLPRPTYPMYDSRAAFCQLEVRYFDLLPENGWDVDLDGVEALADDKTVAILVINPCNPCGNVFSRQHLQKIAETACKLGILVIADEVYDHFAFGDKPFVSMAEFAELVPVIVLGAISKRWFVPGWRLGWMVTLDPHGIMKDSGFVQTLINVVNMSTDPATFIQGAMPDIIGNTKEEFFSSKLEMVKKCAEICYEELMKIPCITCPCKPEGSMFTMVKLNFSLLEDISDDLDFCSKLAKEESMIILPGQAVGLKNWLRITFAVELELLIEGFSRLKNFTERHSKNQP

SEQ ID NO: 9669 - protein, 625 aa, Lactococcus lactis subsp. lactis Il1403
MCGIVGFIDRMNQNDKSKTLEEMMNTIGHRGPSSSGEFIDEGAAIGFRRLSIIDLEGGDQPIFNEDKSKLITFNGEIYNFRELREDLIAKGHDFTTHADTEVLLHGYEEYGVELLQKLRGMFAFVIWDREKQELFGARDHFGIKPLYYTQMGGTFMYGSEIKSFLKHPNFKKELNKEALKPYMTFQYSALDETFFKNVFRIKEGHYFTYKDGVLDIKPYWDMKVDEKDMSLEESIDLIDKTVLGSVDAHKFADVEVGAFVSSGVDSSYVASTLRPEHTYSIGFGQGTFNESKQAKQLTDMIGLNNTSREIHGDEAFKYFPQIQYYLDEPDSNPSCVPLFFLAELAARDVRVVMSGEGADELFAGYESYGFSTNSRAVRVFAEGLKKLPKSLRFSIARGIENKHFKGQKHLYESLAPAEDFFIGQAKVFDESESVELLKEEFKAAPTVKDIVGKTYKKAPEGSELRKMQYLDMHQWMPGDILLKADKMAMAHSLELRVPLLDIELMHTAEQIPTKYLLNEHNTKYAFRQAARRHLPEEWSNRKKLGFPVPIKDWLREEKYYKVVRQLFEQDFVAEFFDQEKLLKMLDDNFADKNDARRKLWTIYSFLTWYDVYFINNGEKPAVVNF

SEQ ID NO: 9670 - protein, 254 aa, Magnetococcus sp. MC-1
MTIPLEVTPLPAWEDNYIWCFPTEPGAVAVVDPGQAEPVTDYLQQHGLRLSHILLTHHHGDHIDGVAPLQRKHHARVLGSALDAHRLPPLDEALRGGQTFCLGPHQVDTYHTPGHTSGHLCYHIADCLFAGDTLFSYGCGRLFEGTPQQMWQSLLILRALPETTRLCCAHEYTLTNLRFARSLPGQQEPLAAPWQRAQQTRQLGKPTLPSRLAEEKQYNPFLRCDDTQFRTAVGQQAASAEACFAYIRQLRNHF

SEQ ID NO: 9671 - protein, 371 aa, Ralstonia eutropha JMP134
MSHLFDPLDIGNLTLPNRIIIAPMCQYSAQDGNAVDWHMIHLGSLALSGAGMLILEATAVSPEGRITAGDLGLYSDENEAALGHVLKAIRAHAPIAVAIQLGHAGRKASSQVPWEGGQQVAPDAPGGWQAVAPSAVPHAEGEARPTALDRAGMDKVRDDFVAAAVRAVRLGIQGFEIHAAHGYLLHQFLSPLANHRDDEYGGSLENRMRFPIEVFDAVRAAVPADRPVWMRISATDWVPGGWDIEGTVALSQAVKARGCAAIHVTTGGVSPAQAIKLGPGYQVPYAQRVKAKVGLPTIAVGLITEPEQAEAIITGNEADAVSLARAMLYDPRWPWHAAAKLGASVAAPKQYWRSQPRELKDLFSGANFGQR

SEQ ID NO: 9672 - protein, 251 aa, Prunus persica
MGRGRVELKRIENKINRQVTFAKRRNGLLKKAYELSVLCDAEVALIIFSSRGKLYEFCSSMSMLKTLEKYQRCSYGSLEANRPVNETQNSYQEYLKLKARVEVLQQSQRNLLGEDLAPLNTKELEQLEHQLEASLNQIRSTKTQFMLDQLCDLQNKEQMLVEANKALRRKLEETSGQAPPLLAWEAAGHGNNNVQHTGLPHHPHSQGFFHPLGNNSTSQIGYTPLGSDHHEQMNVGNHGQHVNGFIPGWML

SEQ ID NO: 9673 - protein, 362 aa, Arabidopsis thaliana
MDRPAVSGPMDLPIMHDSDRYELVKDIGSGNFGVARLMRDKQSNELVAVKYIERGEKIDENVKREIINHRSLRHPNIVRFKEVILTPTHLAIVMEYASGGELFERICNAGRFSEDEARFFFQQLISGVSYCHAMQVCHRDLKLENTLLDGSPAPRLKICDFGYSKSSVLHSQPKSTVGTPAYIAPEVLLKKEYDGKVADVWSCGVTLYVMLVGAYPFEDPEEPKNFRKTIHRILNVQYAIPDYVHISPECRHLISRIFVADPAKRISIPEIRNHEWFLKNLPADLMNDNTMTTQFDESDQPGQSIEEIMQIIAEATVPPAGTQNLNHYLTGSLDIDDDMEEDLESDLDDLDIDSSGEIVYAM

SEQ ID NO: 9674 - protein, 518 aa, Crocosphaera watsonii WH 8501
MQDITRRVGNVSTDFKIVNSWVVILPTLLIVNCTLLNYNLSSMTNSVIFWHRRDLRVSDNIGLSKAYQHSSKLVGLFCLDTDILNQDNVAPARITYMLGCLQDLRESYQQLGGQLLIFQGNPTQIIPQVADALKVDCVFWNNDVEPYSKKRDNQVIEALQERGIHSQTYWDQLLHAPGDILTKSNNAPYKVYTPFWRSWLKEEKANIAQALGKLESLSEEEINTVKNLGIIDLPTAKDLGYSWDAPLILEPGETAAKEQLNYFCDSLIYNYQEQRNYPGINGTSTLSPAFKFGVIGIREVWQATLSAYENTYSDEARENIQTWQQEIAWREFYQHCMYFFPELATGPYRQEFKDFSWDNNEQHFQAWCEGKTGYPIVDAAMRQLNETGWMHNRCRMIVASFLTKDLIINWQWGEKYFMQKLIDGDLSANNGGWQWSASSGMDPKPLRIFNPASQAQKYDPDGEYIRLWVPEISSLDTEYLVTGKIPPLEAHSCGYLQPIVDHKQQQREFKERYKQIKN

SEQ ID NO: 9675 - protein, 1005 aa, Cryptococcus neoformans var. neoformans B-3501A
MTSFNPAPAQIQAAQDHTYGSMPTPTYMGMVDTGAQWDYVGRRGSSRSREPSASPQRAATESGIPRTSTHAASASASSSYAPVAGASGQASSAPHEPTIREEATAVVDRSMRAHQQTTGPSNGNGNSQPKKSKVRMVGDWQLNKTLGAGSMGKVKLATNIVTKEKCAVKIIPRYTDANRKEETTRTPEEVEKQRLKDESKEIRTIREAHISLLLHHPYICGMREFISHQNHHYMVFEFIDGGQMLDYIISHGRLRERAARKFARQIGSALNYCHQNSIVHRDLKIENILISKNGNIKLIDFGLSNLYSPSRHLSTFCGSLYFAAPELLNARPYTGPEVDVWSFGIVIYVLVCGKVPFDDQSMPALHAKIKRGVVEYPSWLSAEVKSLLSRMLVTNPAERATLAEVLSHPFMTKGYDGPPDSFLIRRELLRAEEIDMNVVEAMEGFTFGDANTIYRNLHSILTSEDYLHCVATFEAHREKLRTSSPGVSTNDPSDSPKKKRFSGFDLKKRLFKEDKKVEEAPFKEKVRDPTKGYDPLISIYFLAREKIERERVFGPGFFASSQLSLDTFNTSQGYGMAVPNLPPPASTHVMGHDSSRGPDFASEPRPRSDDVPNPVLAHPSADREQSKLADIPSAVHRRQPSLSQPPLPSSMPAAVERSADEGLTKKFSMLGRGPRPPSAGPSGPSRSASTKRESMTASPSMPIQEHRRATTVVHSDKSKQERRVSVGSFTNSVSKASGLARRASQRDRPPATPPDSRWLNAPAEAEEYHQVETSVRPSSTPREPEPDTANEPRSYDDVKPSYLKGIFSVSTTSTKPANVLIRDIAMVLDRIGIKHRPIKGGFECVHMPSIDLASVVNGDEASTSLSNVPSHASGARRKQSLRRKGSKVNMNGISSNGAGSRATSPGPHRVLTGNSSGTVSGGDVAHLSVPSGKNRHHVGTVEEDEVDAWALAQSGGAGSSLIVRFEIFVVKVPVLPLHGIQFRRVGGDGWQYQMLAKAILREMRL

SEQ ID NO: 9676 - protein, 588 aa, Zea mays
  misc_feature (560)..(560): Xaa can be any naturally occurring amino acid
  misc_feature (572)..(572): Xaa can be any naturally occurring amino acid
MCGILAVLGCSDCSQARRARILACSRRLKHRGPDWSGLYQHEGNFLAQQRLAIVSPLSGDQPLFNEDRTVVVVANGEIYNHKNVRKQFTGAHSFSTGSDCEVIIPLYEKYGENFVDMLDGVFAFVLYDTRDRTYVAARDAIGVNPLYIGWGSDGSVWMSSEMKALNEDCVRFEIFPPGHLYSSAAGAGFRRWYTPHWFQEQVPRTPYQPLVLREAFEKAVIKRLMTDVPFGVLLSGGLDSSLVASVTKRHLVKTDAAEKFGTELHSFVVGLEGSPDLKAAREVADYLGTTHHEFHFTVQDGIDAIEEVIYHDETYDVTTIRASTPMFLMARKIKSLGVKMVLSGEGSDELLGGYLYFHFAPNREELHRETCRKVKALHQYDCLRANKATSAWGLEVRVPFLDKEFVDVAMGMDPEWKMYDKNLGRIEKWVLRKAFDDEEHPYLPEHILYRQKEQFSDGVGYNWIDGLKAFTEQQVTDEMMNSAAQMFPYNTPVNKEAYYYRMIFERLFPQDSARETVPWGPSIACSTPAAIEWVEQWKASNDPSGRFISSHDSAATDRTXTSWRWSTATGTXANGTVNGNDVAVAIAV

SEQ ID NO: 9677 - protein, 244 aa, Liquidambar styraciflua
LATTEFPNQSSEGSSSQKKMGRGKIEIKRIENTTNRQVTFCKRRNGLLKKAYELSVLCDAEIALIVFSSRGRLYEYANNSVKSTIERYKKASDTSNPGSVSETNAQFYQQESSKLRRQIRDIQNLNRHIMGEALSSLTFRELKNLEGRLEKGISRIRSKKNELLFAEIEYMQKREIELQNANMYLRAKIAENERNQQQTELMPGSVYETMPSSQPYDRSFLVANLLEPPNHHYSRQDQTPLQLV

SEQ ID NO: 9678 - protein, 371 aa, Triticum aestivum
AYLGDTIEQVCTKKQAGTGPEFPGYRRPTRPRTRGRTRGCAVDFCHSRGVYHRDLKPENLLLDENSNLKVSDFGLSTISECRRLDGLLHTSCGTPAYVAPEVINRKGYDGAKADIWSCGVILFVLLAGYLPFQDKNLMNMYKKIGKAEFKCPSWFSSDIRRLLLRILDPNPSTRISIERIMEHPWFRKGLDAKLLRYNLQAKDAVPAADMTVTSDPLSCSNSATEGKEQGAKKLSNLNAFDIISLSTGLDLSGMFEDNDKKRESKFTSTNSASTIVSKIEDIAKCMRLKLVKKDGGMMRMESFKPGRKGVMSIDAEIFEVTPDFHLVELKKTNGDTIEYQKVLNQEMRPALKDIVWAWQGEQQPPPPQQSC

SEQ ID NO: 9679 - protein, 481 aa, Pediococcus pentosaceus ATCC 25745
MTEKHYKMPENFLWGGAVAAHQFEGGWQEGGKGVSIADVMTAGNKDTARKVTDGIKDGEVYPNHWGIDFYHRYPEDIKLFNEMGFKCFRTSIAWTRIFPNGDETEPNEAGLKFYDDMFDELLKYNIQPIITLSHFEMPYHLVKEYGGWTNRKLIDFFVRFAETVMKRYKGKVKYWMTFNEINNQTDWSNPHHLLQDSAIKVKAGTPGMEEMMYQAAHNEMVASAKVVELGHQIDSEYQIGAMIAMCPIYPLTAKPEDIMMAERAMQTRYYFGDVQANGEYPNWLPKYWERQNIHVEISDYDREILKKGAVDYIGFSYYMSFTTKSTDENTDYAYKEARDLVDNPYVQKSDWGWQIDPVGLRYSMNWMQDRWHKPQFIVENGFGAYDQKEADGAVHDDYRIKYFHDHILEMEKAVALDGVNLIGYTPWGCIDLISASTGEMAKRYGFIYVDQDDQGNGSLERSKKDSFDWYKQVIASNGEDL

SEQ ID NO: 9680 - protein, 492 aa, Zea mays
MAMKKNQDSQLVMGRYRLGQLLGSGNFAKVYKAHKVATGEAVAVKVLDKDAVHRSGMAEKVKTEVDVMRRVRHPNVVRLHEMMATRSKIYFVMEYASGGELFARLAQSTRFPEPVARRYFQQLMTAVEFCHSRGVYHRDLKPENLLLDARGDLKVSDFGLSALQDGRGGRQLRGDGLLHTACGTPAYVAPEVLLKTGYDGAKADIWSCGVILFVLLAGYLPFNDTNLILVYRKITQSNYKCPPWFSVEARKLLARLLDPNPRTRITISKVTANPWFQKGLCPLTTDKPLDLWETSEVLGKEKACRCRHHQRDDADADADADDEENTRKRKRSKVTVSSPPTVAVRPSSMNAFDIISRSSGLDLSKMFDEEHRSEARFSSRESTPRVRPRVRPRVRTRNLDIKLNKRGRVEMEGGQYCRRGTLVIEAEIFEVAPSVRVVEMRKIGGDSPEFREFYRQELKPSLGDIVWSWQGSDSPPVPLLPPAPRQATNQRS

SEQ ID NO: 9681 - protein, 258 aa, Synechococcus elongatus PCC 7942
MRIDCLPALQDNYIFLLVDVEQRQAAVVDPAEAEPVLAALQAEGLTLTAILNTHHHGDHVGGNRRLLRQFPEAAVSASAVDRDRIPGQTVLLEAGDRLQICGQTAEVLFVPGHTRGHIAYYFPEVAEGNPRGALFCGDTLFAGGCGRLFEGTPAQMLDSLQQLRSLPDDTAIYCAHEYTLNNLRFALTVEPDNFDLQQRYQAVAIARQQGQATIPSRLDIEKATNPFLRWDQAALQAAVSSQDPVQTLARLRSRKDQF

SEQ ID NO: 9682 - protein, 579 aa, Glycine max
MCGILAVLGCSDSSQAKRVRVLELSRRLKHRGPDWSGLHQYGDNYLAHQRLAIVDPASGDQPLFNEDKTVVVTVNGEIYNHEELRKQLPNHTFRTGSDCDVIAHLYEEHGENFMDMLDGIFSFVLLDTRDNSFIVARDAIGVTSLYIGWGLDGSVWISSELKGLNDDCEHFESFPPGHLYSSKERAFRRWYNPPWFSEAIPSAPYDPLALRHAFEKAVVKRLMTDVPFGVLLSGGLDSSLVAAVTARYLAGTKAAKQWGTKLHSFCVGLEGAPDLKAAKEVAEYIGTVHHEFHYTVQDGIDAIEDVIYHIETYDVTTIRASIPMFLMSRKIKSLGVKMVISGEGSDEIFGGYLYFHKAPNKEEFHQETCRKIKALHKYDCLRANKSTFAWGLEARVPFLDKEFIRVAMNIDPECKMIKKEEGRIEKWALRRAFDDEEHPYLPKHILYRQKEQFSDGVGYGWIDGLKAHAEKHVTDRMMLNAANIFPFNTPTTKEAYHYRMIFERFFPQNSARLTVPGGPSVACSTAKAVEWDAAWSNNLDPSGRAALGVHASAYGNQVKAVEPEKIIPKMEVSPLGVAI

SEQ ID NO: 9683 - protein, 480 aa, Saccharomyces kluyveri
MEQVDLVQANILASGANKKTVRVVNGLGSLMGSKDMVDVDFDKDSNMDYLLRKDQEEKDVYKNKKHISEQPWTINNWHQHLNWLNMVLVVGIPLIGWYFALSGKVPLSKKVLIFSVAYYVLGGVSITAGYHRLWAHRAYSARWPLRMLFALFGAASVEGSVKWWGHSHRIHHRYTDTTRDPYDARRGLWFSHMGWMLLQPNPKYRARADIADLTDDWIVRFQHRHYIPIMALTAFILPALLCHYFFNDFWGGLVYAGIIRVFAIQQATFCINSLAHYLGDQPFDDRRTPRDNWITALVTFGEGYHNFHHEFPTDYRNAIKWYQYDPTKVFIYTSSLLGLAYNLKKFSQNAIQQGLVQQQQKKLDRSRSKLNWGTPLTQLPVWDKEEFMKSLKSNPGLVIVSGIVHDVSGYITEHPGGETLIQAAAGKDATKAFNGGVYLHSNAAHNVLATMRVAVIKDGVDAAAKFAARRGESFSSKKAI

SEQ ID NO: 9684 - protein, 373 aa, Zea mays
MDSSGGGGGGAQIKGMATHGGRYVLYNVYGNLFEVSSKYAPPIRPIGRGAYGIVCAAVNSQSGEEVAIKKVGNAFDNHIDAKRTLREIKLLRHMDHENILALKDVTRPPTRENFNDVYIVTELMDTDLHQIVRSNQPLTDDHCQYFLYQLLRGLKYVHSANILHRDLKPSNLFLNANCDLKIADFGLARTTSETDLMTEYVVTRWYRAPELLLNCSQYTAAIDVWSVGCILGEIVTRQPLFPGRDYIQQLKLITELIGSPDDASLGFLRSDNAKRYMKQLPQFPRQDFRLRFRNMSPGAVDLLERMLVFDPSRRITVDEALHHPYLASLHEINDEPTCPAPFSFDFEQPSFTEAHIKELIWRESLAFNPEPPY

SEQ ID NO: 9685 - protein, 324 aa, Arabidopsis thaliana
MKNFNLTHRIVMAPMARMRSYGNIPQPHVALYYCQRTTPGGLLISEATGVSETAMAYQNMPGIWRKEQIEAWKPIVDAVHSHGGIFFCQLWHAGRVSHQDCQPNGESPVSSTDKPFADDPSNEFTPPRRLRTDEIPTIINDFRLAARNATEAGFDGVEIHGAHGYLIDQFMKDSVNDRTDSYGGSLENRCRFALQVIEAVSKEIGPDRVGIRLSPFADYMESGDTDPKRLGLYMAKSLNRFEILYCHMIEPRMKTVSEIFECRESLTPMRNAFNGTFIVAGGYTREDGNKAVAEGRTDLVAYGRLFLANPDLPKRFELNAPLNK

SEQ ID NO: 9686 - protein, 283 aa, Gloeobacter violaceus PCC 7421
MTANVVSGAGGVAGWRALNWPTLGFLVLMHGLALLAPWFFNWQALAVALGLHWLIGSLGICLGYHRLLTHRSFRVPRGLECVFAMLGALALQGGPIFWVAAHRLHHAHADDDARDPHSSGRGFWWSHVLWLLYRHPELSDGQTHRKYAPDLARQPFYRWLNRYHLLLQIPLAVLLFALGGWPFVVYGVFVRAVVLWHTTWLINSAAHLAGYRTSEVPDSSRNLWWAALLTYGEGWHNNHHAQPNAARAGLRWWEVDMTWWVIRALEMAGLATQVVPPRPNPVR

SEQ ID NO: 9687 - protein, 507 aa, Xanthomonas campestris pv. vesicatoria str. 85-10
MRPGHLMVLALLAPTLIAPPVFAQSVLTRDNGAKVGDNQNSQTAGATGPTLLQDVQLIQKLQRFDRERIPERVVHARGTGVKGEFTATADLSSLTKAKVFSAGEKTPVFVRFSSVVHGNHSPETLRDPHGFATKFYTSEGNWDLVGNNFPTFFIRDAIKFPDMVHAFKPDPRTNLDDDSRRFDFFSHVPEATRTLTLLYSNEGTPAGYRFMDGNGVHAYKLVNAQGEVHYVKFHWKTLQGIKNLDPKQVAAVQAKDYSHLTNDLVAAIKKGDYPKWDLYVQVLKPEDLAKFDFDPLDATKIWPDVPEQKVGQMVLNKNVDNFFQETEQVAMAPANLVPGIEPSEDRLLQGRIFSYADTQLYRIGANGLSLPVNRPRVAVNNGNQDGQGNIGQTTSGVNYEPSRLEPRPQDTAARYSELPLSGTTQQAKITREQNFKQAGELYRSYSKKDRADLVQSFGESLATTDPESKHLMLSFLYKADPEYGTGVTRVAKGDLARVKQLASSLQD

SEQ ID NO: 9688 - protein, 498 aa, Triticum aestivum
KKNILIEKLHIDISPSLAPWRLVPVSGIENICSSSIDNLGLESSKDEESSNALLSRAWSPGWRNAEKTLEDFVSHGLLDYSKDRMKVAGTTTSLLSPYLHYGEVSVRKIYQLVRVQQIKWENEGKSGAGESVNLFLLSIGLREYSRYLCFNFPFTHERSLLGNLKHYPWRADEDRFKSWRQGMTGYPLVDAGMRELWATGWTHNRIRVIVSSFAVKFLQIPWTWGMKYFWDVLLDADIESDILGWQYISGSLPDGHELGRLDNPEVQGQKYDPDGEYVRTWIPELARMPGEWIHHPWDAPSSILEVAGVELGFNYPMPIVELHTARECLDDAISTMWQLDTAEKLAELDGEVVEDNLSHIKSFDVPKVVLKELSPHCDREVPTDDGRNLELQPKELKGTNKQTICVDVIKASKMEDTGSIANSPISRKRSSSGSVFNVPSYSSSVEVHSQNQHPGGYLVGSSKYILQKAERNCVGKAEDDDSADSGTNTSRASKRPAA

SEQ ID NO: 9689 - protein, 719 aa, Oryza sativa
  misc_feature (505)..(505): Xaa can be any naturally occurring amino acid
MSASPSSMSGAGAGEAGVRTVVWFRRDLRVEDNPALAAAARAAGEVVPVYVWAPEEDGPYYPGRVSRWWLSQSLKHLDASLRRLGASRLVTRRSADAVVALIELVRSIGATHLFFNHLYDPLSLVRDHRVKALLTAEGIAVQSFNADLLYEPWEVVDDDGCPFTMFAPFWDRCLCMPDPAAPLLPPKRIAPGELPARRCPSDELVFEDESERGSNALLARAWSPGWQNADKALAAFLNGPLMDYSVNRKKADSASTSLLSPYLHFGELSVRKVFHQVRMKQLMWSNEGNHAGDESCVLFLRSIGLREYSRYLTFNHPCSLEKPLLAHLRFFPWVVDEVYFKVWRQGRTGYPLVDAGMRELWATGWLHDRIRVVVSSFFVKVLQLPWRWGMKYFWDTLLDADLESDALGWQYISGSLPDGRELDRIDNPQLEGYKFDPHGEYVRRWLPELARLPTEWIHHPWDAPESVLQAAGIELGSNYPLPIVELDAAKTRLQDALSEMWELEXAASRAAMENGMEEGLGDSSDVPPIAFPPELQMEVDRAPAQPTVHGPTTAGRRREDQMVPSMTSSLVRAETELSADFDNSMDSRPEVPSQVLFQPRMEREETVDGGGGGGMVGRSNGGGHQGQHQQQQHNFQTTIHRARGVAPSTSEASSNWTGREGGVVPVWSPPAASGPSDHYAADEADITSRSYLDRHPQSHTLMNWSQLSQSLTTGWEVEN

SEQ ID NO: 9690 - protein, 407 aa, Debaryomyces hansenii CBS767
MTKSFNYQLSTEFKPKSLADTSLFKPIKVGNMNLQHRAVLAPLTRFRNHINSIPNPEAMGMYYGQRSSRPGTLVITEATIVSAAAGGYDTAPGIYNQEQIDAWSKIFKRVHDNNSYVYLQLWSLGRQSDPANLKKIGKPFVSASDVYSDDRGITSEGVIAEDGAIAVNNELRPMTIPEIKQYVNDYAQAARNSLAAGADGVEVHCGNSYMLNQFLDISSNLRTDEYGSQTLENRARFALECIDAVVEAVGADKVGVRFAPYGRFGGMSGSDDLTAIALYAYIFAELEKRAQQGKRVSYIHLVQARMTDFNINENDESAKFDTEFVYKIWKGVVMKAGAYATDPAAVRREVEVGQTLIAYGRYFISNPDLPDRLALGKPLTKYVRDSFYLPDPIAGYVDYPTYKQQDL

SEQ ID NO: 9691 - protein, 432 aa, Zea mays
  misc_feature (22)..(22): Xaa can be any naturally occurring amino acid
  misc_feature (35)..(35): Xaa can be any naturally occurring amino acid
MGSKKRSPQHPASPAGGEVGAXGGGEGHAGDGGAXTAPVAVVPKPPDVAPFLTKVYDMVSDPATDAVISWSAGGGSFVIWDSHVFERDLLPRHFKHNHFTSFIRQLNTYVRITPSLMLYWMKLLLIVCMKLYACTEIVTYDRWEWANEGFIKGQKHLLKTIKRKKKSSQDVPSDLQSVPVKTAPGTENIEIGKYGGLEKEVETLKRDKALLMQQLVDLRQYQQSSSAEVQNLIQRLRVMEQNQQQMMALLAIVVQNPDFLNQLVQQQRRSNWWNDDGNRKRRFQALEHGPVDDQETSGGGAQIIQYRPPVPETSNQPIPANEAFYSTPAQPASSPALEMPMDVEMTSNNVNTFDSTGNDFTDTSALCEWDDMDIFGDELEHILQQPEQDFQVDPPLTVEDYGYDHPRLEQDYQMEAQQNCKNPQYADVITEA

SEQ ID NO: 9692 - protein, 651 aa, Crocosphaera watsonii WH 8501
MNDNATAKNPFLEEFDYYLFGQGDHHRIYEKMGAHLVEVDGVSGVYFATWAPNAHEVAVVGNFNNWNHEANKMRRTEVGIWELFIPGMNVGDLYKYSVKNHHHYCVYKTDPYGYQQEIRPATASVVADLSTYTWKDQEWIDKRERSNPEKQPMSVYEVHLGSWLHTSIDNPPKEGTSLAVEQKPGARYLNYRELADQLISYVKDMGYTHIELLPVTEYPFDGSWGYQVVGFYAPTSRYGPPEDFMYFVDKCHQEGIGVLLDWVPGHFPKDEHGLAYFDGGPLYEYEDSRKGEIKTWGTLVFDYGRNEVRNFLIASALFWFDKYHIDGIRVDAVAYMIELDKGREGDWIPNQYGDNGHLEAISFLQHLNNTIAHNYPGVVTIAEDSTAWGNVSRPASEGGLGFTFKWNMGWMNDTLKYLKEHPNHRSNCHNKLTFSIWYAFDEKFMLALSHDEVVHLKGHLVNKMPGDEWQKMANVRTLLTYMFAHPGKKTLFMGMEFGQTSEWQEFLDLDWYLLQYEPHKGLKRLVQDLNKMYIREPALYMEDFSYEGFEWIEANDAPRGLISFVRKDPASGDMIVAVCNFKPYVYENYWVGLHYPGEYVELINSDSQVYWGSGVCNPSVIHTREWHDAPWSHALEITVPPLGAVLYKLKR

SEQ ID NO: 9693 - protein, 338 aa, Bacillus subtilis subsp. subtilis str. 168
MARKLFTPITIKDMTLKNRIVMSPMCMYSSHEKDGKLTPFHMAHYISRAIGQVGLIIVEASAVNPQGRITDQDLGIWSDEHIEGFAKLTEQVKEQGSKIGIQLAHAGRKAELEGDIFAPSAIAFDEQSATPVEMSAEKVKETVQEFKQAAARAKEAGFDVIEIHAAHGYLIHEFLSPLSNHRTDEYGGSPENRYRFLREIIDEVKQVWDGPLFVRVSASDYTDKGLDIADHIGFAKWMKEQGVDLIDCSSGALVHADINVFPGYQVSFAEKIREQADMATGAVGMITDGSMAEEILQNGRADLIFIGRELLRDPFFARTAAKQLNTEIPAPVQYERGW

SEQ ID NO: 9694 - protein, 447 aa, Paenibacillus polymyxa
TIFQFPQDFMWGTATAAYQIEGAYQEDGRGLSIWDTFAHTPGKVFNGDNGNVACDSYHRYEEDIRLMKELGIRTYRFSVSWPRIFPNGDGEVNQKGLDYYHRVVDLLNDNGIEPFCTLYHWDLPQALQDAGGWGNRRTIQAFVQFAETMFREFHGKIQHWLTFNEPWCIAFLSNMLGVHAPGLTNLQTAIDVGHHLLVAHGLSVRRFRELGTSGQIGIAPNVSWAVPYSTSEEDKAACARTISLHSDWFLQPIYQGSYPQFLVDWFAEQGATVPIQDGDMDIIGEPIDMIGINYYSMSVNRFNPEAGFLQSEEINMGLPVTDIGWPVESRGLYEVLHYLQKYGNIDIYITENGACINDEVVNGKVQDDRRISYMQQHLVQVHRTIHDGLHVKGYMAWSLLDNFEWAEGYNMRFGMIHVDFRTQVRTPKQSYYWYRNVVSNNWLETRR

SEQ ID NO: 9695 - protein, 221 aa, Brassica napus
MPAHPQSLIYSFVARGTVILVEFTDFKGNFTSVAAQCLQKLPSSNNKFTYNCDGHTFNYLVEDGFTYCVVAVESAGRQIPMAFLERVKEDFNKRYGGGKAATAQANSLNKEFGSKLKEHMQYCMDHPDEISKLAKVKAQVSEVKGVMMENIEKVLDRGEKIELLVDKTENLRSQAQDFRTTGTQMRRKMWLQNMKIKLIVLAIIIALILIIVLSVCHGFKC

SEQ ID NO: 9696 - protein, 377 aa, Candida albicans
MSADGEFTRTQIFGTVFEITNRYTELNPVGMGAFGLVCSAVDRLTGQNVAVKKVMKPFSTSVLAKRTYRELKLLKHLKHENLITLDDIFISPLEDIYFVNELQGTDLHRLLNSRPLEKQFIQYFTYQIMRGLKYIHSAGVIHRDLKPSNILINENCDLKICDFGLARLQDPQMTGYVSTRYYRAPEIMLTWQKYDTEVDLWSVGCILAEMIEGKPLFPGKDHVHQFSIITELLGSPPADVIDTICSENTLRFVQSLPHRDPIPFSERFASCTHVEPEAIDLLAKLLVFDPKKRISAVQGLTHPYMEAYHDPTDEPVCESKFDWSFNDADLPVDTWRVMMYSEILDFHQTVGVANETEGSEQPDSQVEQNNLDSANGA

SEQ ID NO: 9697 - protein, 482 aa, Bordetella pertussis Tohama I
MNAMTNKTLTTAAGAPVADNNNTMTAGPRGPALLQDVWFLEKLAHFDRERIPERVVHAKGSGAYGTFTVTHDISRYTRARIFAEVGKQTPLFLRFSTVAGERGAADAERDVRGFAIKFYTDEGNWDLVGNNTPVFFIRDPLKFPDFIHTQKRDPKTNLRNATAAWDFWSLNPESLHQVTILMSDRGLPQNYRQQHGFGSHTYSFVNDAGERFYVKFHFKSQQGIACYTDGEAAELVGRDRESAQRDLFQNIEQGQFPRWTLKVQVMPEAEAATYHINPFDLTKVWPHADYPLIEVGVLELNKNPENYFAEVEQAAFTPANVVPGIGFSPDKMLQGRLFSYGDTHRYRLGINHHQIPVNAPRCPFHSFHRDGMGRVDGNGGATLNYEPNSFGEWREAKHAAEPPLALDGQAADRWNHRVDEDYYSQPGALFRLMNDDQKQQLFGNIGRHMAGVPEEIQRRQLEHFRRADPAYAAGVAKALGLK

SEQ ID NO: 9698 - protein, 177 aa, Brassica napus
MSCPVTVSATGLGRSIPSPMTVNPLPLVSMVYHASESAANNPGLSTVRDEATKGYIMQQTMFRVKDPKASLDFYSRVLGMSLLKRLDFSEMKFSLYFLGYEDTSTAPADPTERTVWTFGRPATIELTHNWGTESDPEFKGYHNGNSEPRGFGHIGVTVDDVHKACERFEQLGVEFVK

SEQ ID NO: 9699 - protein, 312 aa, Triticum aestivum
  misc_feature (116)..(116): Xaa can be any naturally occurring amino acid
MAESFVLSTGSRIPSVGLGVWQIQPDAANDAIYAAVKAGYRHIDCAAAYNNEEEVGLALKKLFEDGVVKRDDLFITSKLWAANHAPEDVEEGIDTTLQDLQLDYLDLYLIHGPIRXKKGTSTMTPENFLPTDIPATWAAMEKLYDSGKARAIGVSNFSCKKLHDLLAVARVPPAVNQVECHPVWQQDKLRKLCQSNGVHLSAFSPLGSPGSPWINGPSVLKNPIVVSVADKLQKTPAQVALRWGIQMGHSVLPKSANESRIKENIDIFGWSIPEDLMAKFSEIKQVRLLTAEFVVHPQAGYNTLEDFWDGEI

SEQ ID NO: 9700 - protein, 434 aa, Triticum aestivum
VTILNKFVQKSRLVPVRNSRDIVDPRIREHVASALGADTNAVRRKNLHSVESLTKFYGDAAGDAPTYSLIDIFDKLASSPEYRSRAEAVERFNGGSRWKKRGISCVPITYEVALRPTPGKVSILNDGSIAVEVGGVELGQGLYTKVKQMTAFGLRELCPDADGLLDKVRVIQADTLSLIQGSFTGGSTTSESSCEAVRQSCTVLFERLKPIKDSLEAGPGAAAPWSALIAQAKMASVNLSAHAYWKPGPAFRKIHPPTGAAVSEVEIDVLTGATTIMRSDLVYDCGQSLNPAVDLGQVEGAFVQGVGFFTNEDYATNADGLVVNDGTWTYKIPTVDTIPKQFNVELISSARDKKRVLSSKASGEPPLLLAASVHCAMREAIRAARTDFSVNSPLTFQMDVPATMADVKELCGLDVVERHLQSLSSAAEVPTPVA

SEQ ID NO: 9701 - protein, 243 aa, Prunus persica
MAYENKSMSLDSPQRKLGRGKIEIKRIENTTNRQVTFCKRRNGLLKKAYELSVLCDAEVALIVFSNRGRLYEYANNSVKETIERYKKACAESTNTGSVSEASTQYYQQEAAKLRAQTGNLQNSSRHMMGESLSSMNMKDLKNLESKLEKGINRIRSKKNELLFAEIEYMQKREIDLHNNNQLLRAKIAENERSQQNINVMAGGGSYEIMQSQPYDSRNYFQVNALQPNHQYNSRQDPMALQLV

SEQ ID NO: 9702 - protein, 492 aa, Zea mays
MDPYKHRPSSGSNSSFWTTNSGAPVWNNNSALTVGQRGPILLEDYHLIEKLAQFDRERIPERVVHARGASAKGFFEVTHDVSHLTCADFLRAPGVQTPVIVRFSTVVHERGSPETLRDPRGFAVKFYTREGNFDLVGNNMPVFFIRDGMKFPDMVHVFKPNPKTNLQENWRIVDFFSHHPESLHMFTFLFDDVGIPLNYRHMEGFGVNTYTLINRDGKPHLVKFHWKPTCGVKCLLDNEAVTVGGTCHSHATKDLYDSIAAGNYPEWKLYIQTIDLDHEDKFDFDPLDVTKTWPEDIIPLQPVGRMVLNKNVDNFFAENEQIAFCPAIIVPGIHYSDDKLLQTRIFSYADTQRHRLGPNYLMLPVNAPKCAHHNNHHDGFMNFMHRDEEVNYFPSRFDPARHAEKVPIPPRVLTGCREKCIIQKENNFKQAGERYRSFDPARQDRFIQRWVDALTDPRVTHEHRTIWISYWSQCDAALGQKLASRLNLKPSM

SEQ ID NO: 9703 - protein, 255 aa, Prunus persica
MGRGSVQLKRIENKINRQVTFSKRRSGLLKKAQEISVLCDAEVALIVFSTKGKLFEYSTDSCMERILERYERYSYSEKQLLANDHESTGSWTLEHAKLKARVEVLQRNCSHFMGEDLQSLSLKELQNLEQQLDSALKHIRSRKNQVMYESISELQKKDKALQEQNNLLAKKVKEKEKALAPQAESWEQQVQNQGLDCSSTLLPEALQSLNFGSGSNYQGIRNDGSGGDHEDENETPTANRPNTLLPPWMLRHLNE

SEQ ID NO: 9704 - protein, 596 aa, Sorghum bicolor
MAEGEERPSGGGDDENGEERPSGGGDDENGKYPIGFRFEPTTEELVEFYLLPRLLGEPTVPNEFVIEADAYGCDPEILTEKYKESGVDDTWYFLSPRYRKYRGGDRPVRRTADDRGRWKPSTGQSKPPEDEDDDDASTSRHSKAKKKQAAFSENTLAYYVGSTKDETKTKWLMHELVVPVTPDNGFHSKSKSAAAEPRNDMLVSSRRARRSNSAVFECLRWWIYKSPLRKWKEIDEAAAAAEVPTSSHSSWPAPECVIGEAAARATSSRQQPPAKRPAVGRPAAASGHTGAPNKGVSVSQSTLFPGGCSAPPTRGNGRGSSVRMPPIVVGAGAAGHHGPGLPALMHLLRPPVQVQQTPLVYGYGNRAAGMPNVNGQAAPRWQGPPPHRAAATTPNSLGPEMMTRPPNLAAGQPAWLPSPRRQQQQQQQQQQQQQQPPPETEEAYRNRVYARLIAEMKLQKKAEQDSAARAGQQQISQTASASAKPACFHDEGGDRPAGVEAMVRPAQFPAPHGGYPYGSSSSSNNLAQRPQRQQSTSSAALAPALAAVEKAPAAENVPSNQPVPPAPGANEGSCKGDAPTATIADNIILQILTTDC

SEQ ID NO: 9705 - protein, 159 aa, Triticum aestivum
MAGMVFGLETPMMTALQHLLDIPDGEAGAAAGEKQGPTRAYVRDARAMAATPADVKELPGAYAFVVDMPGLGSGDIKVQVEDERVLVISGERRREEKEDAKYLRMERRMGKLMRKFVLPENADMEKISAACRDGVLTVTVDKLPPPEPKKPKTIQVQVA

SEQ ID NO: 9706 - protein, 353 aa, Actinobacillus pleuropneumoniae serovar 1 str. 4074
MAKFRYLQTPFKLKNLELKNRIVMPPMCQYSATDGVPNDWHFVHYTARAIGGVGLIIVEMTNVAPNGRITPKCLGLWNDEQRDAFKPIVDSVHKYGSKIVVQIGHAGRKAQDCDDVVAPSAIHYGELDYAGQNLKTPRELSKAEIQEVIQSYQDAVKRAVEAGFDAIEIHGAHGYLIHQFSSPKSNQRSDEYGQDRFLFGEQVIKAAKAVMPADMPLIVRISAQEFGANGFDADYGVEMARRFAAAGADCMHVSAGGDGVLAEGKHPPFNAGYQVYLARAVKQATGLPTIAVGMLDDANVVDHVLSIGDADLVAVGRALLRDPQWVLNVQYAQNATNSSGVEFVPAQYQRGYF

SEQ ID NO: 9707 - protein, 482 aa, Zea mays
MAASVTVENLNPKVLKCEYAVRGEIVIHAQRLQQQLQTQPGSLPFDEILYCNIGNPQSLGQQPVTFFREVLALCDYPCLLEKEETKSLFSADAISRAKQILATIPGRATGAYSHSQGIKGLRDAIAAGIMSRDGFPANADDIFITDGASPGVHMMMQLLIRNEKDGILCPIPQYPLYSASIALHGGALVPYYLNEKTGWGLEISDLKMQLENARSKGIDVRALVVINPGNPTGQVLAEDNQYDIVKFCKNEGLVLLADEVYQENIYVDNKKFNSFKKIVRSMGYGEDDLPLVSLQSVSKGYYGECGKRGGYMEITGFSTPVREQIYKIASVNLCSNITGQILASLVMNPPKVGDESYASYKAEKDGILESLARRAKALEDAFNKLEGFSCNKAEGAMYLFPQIHLPQKAIEAAKAAKKAPDAFYALRLLESTGIVVVPGSGFRQVPGTWHIRCTILPQEDKIPAVISRFRAFHEAFLAEYRD

SEQ ID NO: 9708 - protein, 275 aa, Salmonella typhimurium LT2
MANPTIIRLQDGNVMPQLGLGVWKASNEEVIAAIHKALEVGYRSIDTATAYQNEEGVGKALKAASVAREELFITTKLWNDDQKRPREALQESLKKLQLDYLDLYLMHWPVPAIDHYVDAWKGMIALQKEGLVKSIGVCNFQIHHLQRLIDETGVTPVINQIELHPLMQQRQLHAWNATHKIQTESWSPLAQGGEGVFDQKVIRELADKYGKTPAQIVIRWHLDCGLVVIPKSVTPSRIAENFAVWDFRLDKDELGEIAKLDQGKRLGPDPDQFGG

SEQ ID NO: 9709 - protein, 721 aa, Novosphingobium aromaticivorans DSM 12444
MKPPASAIDALLDGTHADPFSLLGIHEGPDGAFARAVLPGAEEAVAWSLSGKKLGKLSRVDGRGLFEGKVKGPRQPVRYACKADGHEWLVTDPYSFGPVLGPLDDFLIAEGTHLRLFDKMGAHLIEHEGARGVHFAVWAPNARLVSVVGDFNDWDHRRHPMRRRADIGVWEIFIPDIGEHRAYKYRIVGHDGGVLPLKADPYALAAEFRPSTASLTAHPVKMDWADAAHRAHWASVDARREPMSIYEVHPGSWQKPHEEGFHTWDELADRLIPYVAEMGFTHIEFLPVSEHPYDPSWGYQTTGLYAPSARFGPPEGFARFVDGAHRAGISVLIDWVPAHFPTDEHGLVRFDGTALYEHEDPRLGFHPDWNTLIYNFGRREVVSFLVNNALFWAERYHVDGLRVDAVASMLYRDYSRKAGEWIPNAEGGRENWEAVEFLKAMNRAVYGSHAGFLTIAEESTAWPGVSKPAFDGAPRENLGFGFKWNMGFMHDTLKYMAREPIHRRYHHDEITFGLMYAFSENFVLPLSHDEVVHGKGSLLNKMSGDDWQKFANLRAYYGLMWGYPGKKLLFMGQEFAQRREWSEARALDWDLLQAPAHEGIRRWVRDLNRVYASRPALHARDCEPEGFEWLVVDDAEASIFAWLRKAPGARPVAVICNMTPQVHDHYRLPLPLDGEWREVLNSDAEDYGGSGIGNLGKVTAEQGAAFVVLPPLATLMLEFEG

SEQ ID NO: 9710 - protein, 468 aa, Zea mays
MFHHQQELLQAEAAAADRESSMSNLTSSTFGGPNAAPAAAAAAPPAPAASGNNKRKRSLPGNPDPEAEVVALSPATLMATNRFVCEICGKGFQRDQNLQLHRRGHNLPWKLKQRGTGKEAQRRKVYVCPEASCVHHDPARALGDLTGIKKHFFRKHGEKKWKCDKCSKKYAVHSDWKAHSKICGTREYKCDCGTIFSRRDSFITHRAFCDALTEESAKAIGLNAMAAVPAQHHHHPMLFSPPPTHVMQQDVALLQEHHHQEVMQQEHCNYAMKTEMPPWPGMTYDHPLLQPLCNAAAPQSSATSTPPPPTTMQLPAAYAHLSATALLQKAAQMGATVAGAGYTQMAGAATSATFGLGLPDLQNTQQQQHQDGEIMAGLARTASHGRGGEEGGGGGGDGMTRDFLGLRAFSHRDILGLAGLDSSCMGAIISASASMNCYDEPQQRAQAQAEQQQQSSNEQWHSMGSHQS

SEQ ID NO: 9711 - protein, 505 aa, Bifidobacterium longum DJO10A
MNSRGLKQVDLVHAAEHRGVKMGKSHISQYVAGKTMPREDVLEFLASELDVDTNWLRGEESTTQLNSDASNSVTDGEHAATPLAMGAAKPQTDSEIPVGRRRTFGKSHKLDNVLYDVRGPVADEAMRMEANGTHILKLNIGNPAPFGFRTPDEVVYDMAHQLTDTEGYSPSKGLFSARKAIMQYAQLKNIPNVTIDDIYTGNGVSELINLSMSALLDTGDEVLVPSPDYPLWTACVNLAGGTAVHYLCDEQSEWYPDIDDIRSKITSNTKAIVIINPNNPTGALYPKEVLQQIVDIAREHQLIIFSDEIYDRLVMDGLQHISIASMAPDLFCVTFSGLSKSHMIAGYRIGWMILSGNKRIAKDYIEGLNMLANMRMCSNVPAQSVVQTALGGHQSVNDYIVPGGRVHDQRDLVYDMLNQIPGITAVKPKAAFYIFPKIDVKRFNIHSDEQFALDLLHDKHILISHGGAFNWHRPDHFRVVYLPRMGMLRETMGEISDFFSYYWQS

SEQ ID NO: 9712 - protein, 111 aa, Taraxacum officinale
KKRGHAHGNRSWIKIEENGNSKVVELDKASVMRQCCLPARDLRLLDPLFIYPSTILGREKAIVVSLEQIRCIITADEVFLMNSLDASVVQYKSELCKRLQEEKCHSDDLPF

SEQ ID NO: 9713 - protein, 492 aa, Arabidopsis thaliana
MDPYKYRPSSAYNAPFYTTNGGAPVSNNISSLTIGERGPVLLEDYHLIEKVANFTRERIPERVVHARGISAKGFFEVTHDISNLTCADFLRAPGVQTPVIVRFSTVVHERASPETMRDIRGFAVKFYTREGNFDLVGNNTPVFFIRDGIQFPDVVHALKPNPKTNIQEYWRILDYMSHLPESLLTWCWMFDDVGIPQDYRHMEGFGVHTYTLIAKSGKVLFVKFHWKPTCGIKNLTDEEAKVVGGANHSHATKDLHDAIASGNYPEWKLFIQTMDPADEDKFDFDPLDVTKIWPEDILPLQPVGRLVLNRTIDNFFNETEQLAFNPGLVVPGIYYSDDKLLQCRIFAYGDTQRHRLGPNYLQLPVNAPKCAHHNNHHEGFMNFMHRDEEINYYPSKFDPVRCAEKVPTPTNSYTGIRTKCVIKKENNFKQAGDRYRSWAPDRQDRFVKRWVEILSEPRLTHEIRGIWISYWSQADRSLGQKLASRLNVRPSI

SEQ ID NO: 9714 - protein, 333 aa, Cryptococcus neoformans var. neoformans JEC21
MAPASHFTLNNGKKIPSIGLGTWQSEPGQVAKAVESALKSGYRHIDCAWAYGNEKEVGEGLKASGVPREEIHITSKLFELHHHPEHVELACKDTLKNLGVEYLDLYLLHWNINFQVDAPKGTVPTFDHAVKADNGKIKLDVALADNVMPTWREMEKLVEKGLVKSIGISNFNIHRTEKLLKEAKIKPVADQVELSIQCPQHELVAYLKSKDILPQGYSPLGGTGKSNLRENDVVQKIADKYKVQTANILLSWLVMRGINPVPKSVTPERIANNLKLVDLSQEDFKELEKLAESHPPKRVCDQSEDFEPKYDIFQENDPEFSDKAQFAKLGLKL

SEQ ID NO: 9715 - protein, 494 aa, Arabidopsis thaliana
MDGSSEKTTNKLVSILPNYRIGKTLGHGSFAKVKLALHVATGHKVAIKILNRSKIKNMGIEIKVQREIKILRFLMHPHIIRQYEVIETPNDIYVVMEYVKSGELFDYIVEKGKLQEDEARHLFQQIISGVEYCHRNMIVHRDLKPENVLLDSQCNIKIVDFGLSNVMHDGHFLKTSCGSPNYAAPEVISGKPYGPDVDIWSCGVILYALLCGTLPFDDENIPNVFEKIKRGMYTLPNHLSHFARDLIPRMLMVDPTMRISITEIRQHPWFNNHLPLYLSIPPLDTIDQAKKIEEEIIQNVVNIGFDRNHVVDSLANRIQNEATVAYHLILDNRNQNSVPNDPFQSKFKEISDGIFNSTLPVQNITSHVGHSFSALYGLKSNVKDDKTWTLGLQSQGSPYDIMTEIFKALQNLKICWKKIGLYNIKCRWVRSFAYYKNHTIEDECAIILPTVIKFEIQLYKVREGKYLLDILRIDGPQFIFFDLCVAFLRELGVL

SEQ ID NO: 9716 - protein, 264 aa, Haloarcula marismortui ATCC 43049
MVGVGTWDIDGDTVQKSVRAGLNVGYAHVDTAEGYKNESEIGEALADYDREDVFLTSKVLPKHLDYESVIEACEASLDRLGTDYLDLYLVHWPNPATSIRETMNAMATLHDQGKIRNVGVSNFSAYQLGAAQHVADVPIAVNQIEYHPWNTQDQVVEFCRDTDTVVEAAAPLGRTKVFADDIIQDLSEKYDRSPAQIVLKWAVENNVVVLPKSSSPEHVRQNFDLFDWELDATDRERIDAIEREQAVYDTGINDWDNDTYGISQ

SEQ ID NO: 9717 - protein, 460 aa, Salmonella enterica subsp. enterica serovar Typhi Ty2
MRYRFPDNFWWGSACSALQTEGDSLNGGKSQTTWDVWFERQPDRFHQGIGPAETSTFYRHWKQDIALLKQLKHNSFRTSLSWARLIPDGVGEVNPQAVSFYNHVIDELLAQGITPFITLFHFDMPMVMQEKGGWENRDVVEAFGRYAQTCFTLFGDRVKHWFTFNEPIVPVEGGYLYDFHYPNVVDFKRAATVAYHTVLAHSTAVRAWRAGRYDGEIGVVLNLTPSYPRSQHPADVQAAHHADLLFNRSFLDPVLKGEYPAELVALLKTYDQLPACQPGDRQLIADGKIDLLGINYYQPRRVKCRDTAVNPQAPFMPEWLFDYYDMPGRKMNPYRGWEIYAPGIYDIITNLRDNYGNPRCFISENGMGVENEQRFVQAGQIHDDYRIDFISEHLKWLHKGISEGCHCLGYHMWTFIDNWSWLNGYKNRYGFVQLDLATQTRTVKKSGEWFAATAEHNGFD

SEQ ID NO: 9718 - protein, 1462 aa, Candida albicans SC5314
MSTVVNRRSSHQFDSPSNHLDHSSSMNVDKVVQSVTNATKRLSQISTNTNNSNKKRKTQNKIGPWKLGRTLGRGSTGRVRLAKNTTTGQLAAVKIVPKSNFKKLENPKYKRSKEDATRLPYGIEREIIIMKLISHPNIMGLYDVWENKNDLYLILEYIEGGELFDYLIKRGKLQEYEAINYFKQIINGINYLHQFNICHRDLKPENLLLDFNKNIKIADFGMAALEVKEKLLETSCGSPHYASPEIVAGKNYHGAPSDIWSCGIILFALLTGHLPFDDENIRKLLLKVQSGKFNMPPELSFEAKDLITKMLKVNPRERITIDAILTHPLLAKYPEPTVSYSSTTTLDINSINIKQIESVDKIDKEILKNLSVLFHNCDEKTIISRLLSPNRCPEKMFYYLLMKYRNEHLSNSNSFNSSNDVDSARSLPRSTSYVKTTVTDHATGEKHTTVKKIQQSSSIYSNRSLLKKSTSAKGNVLSNITNRPNTPKQFSASSSFNKKKALHSKTQIYASRSRNASSRSLKSNSSTGRNGNNASVTSVNKIPEITGATVLQPIPSMAMNRGDEQQNKTKKNLTGTFGNKSLLNFQLICEEVFENDKENSKPVSKTPVSQLPPPPPPPIETPTSRTNSVKRGKTWSLARRERELAEQVRQRNEARENKLKAEELARKELEQEKKRIAEEKKRLEQQERELDEKQKLQEKQKAALEKLQKHQSAHDFEGLFASNRRSVTDMAPSSGMSSLDPRAHMVSRANTIGSPNLSSSSVNIDENASKVLHKFGIDVAPSPKRFSRASKTSTSKNLSSFLAPTVSRNLSSQLKTSSSKNLAGYLHGTTDTNGSAIAAKKKDDSTNEALTIEEFNAKERTSMSPSISKASVNKRNSNQSSYYRSMFSDNGNDDNVTKVRTGESHLSVQEEEEMDMENAIDEDISLIPNPRFSRFSFGGLLGSNTVANEEGDWTIMNSTLNHSNTVVRGTHNKSSTMLGLGIKMRDTTTIKEDEEFEDEKPFISVPSSEDDEGNTHKNKRGGLRDSGNYDFDEEHSVASTANTEYSDVASQGQQMPGSHTIHQLETELSNFDLLSYRVADIGKVNKHKPSIVDSKETLLKNHSSDEATIEVKEDNNEHDFNDKIKQHYDDNGDSEEDDEDEDEEEEDDDDDDDARSSFEARPHSHNYSLAEITSESPVGGGYESPSIANDFKKSRHSTGIFSTTQFPRSPYVVNNNGDSNKDENSQQQTKHMLNDGHKGLITSPVQDTFGSKKPVESNSLFRRLSLNPNRAAPKAPAPPPPSAPISSAAKANISQPLSSPTKGHNRFSRISIGSKNMLQKEDKSTKSNWFKKFFHSLTTPSAKDQSGNSSSKVASKDIKIIDTSLTAAQLIRVIKYQLELKKIEGSISKVDIDEEFGLISGVIPSKFANGRKLKFKIEVIDLINSSSLHVIKMKGNDKGFQSLVNIVTFIIKKEEQDKISRR

SEQ ID NO: 9719 - protein, 1084 aa, Pseudomonas aeruginosa
MKSASALEHDNKLLLKWTTLSQSLSIGLICVVVLTVLLFSICYWSLGRLFQEEEDKVSFHFTRMMDVIREHEVFLGRIARKSDKTTQKYDYDVVPLQRHLLAKENGLAVYEGREFSFAMPFLLATKHALSADSSGDPFSLGVLLANFYGSFWSVSAYPAPQLLIFDLSGSTRLAVPSIPSTAQRDRLSGSYPMIVERILARLRTRPVGEDAQRVHWIRADRYRDSALEMLGVARVDLPETLWWHDEPNHLIIAASLLDLRRINDFEQLVERPAFDSYSLVSPDGEVLLGAAPATGLRDGLNLTRQGVAVQLLSQPENGWLAVYRTDYGNFFRHSRWLVAGLLLTPALLLAGWLGMRWYTSSVVNPVHRAHRQLVESDTFSRTLIQTAPVALVVLTQDDQQLVTCNHLAAQWLGGPTEILGLTSNWKLFDARGQVPGDICIQVGGRYLQTAFAATRYAGTEAVLCVFNDITVHCEAETALSNAKRAADAASQAKTLFLARMSHEIRTPLYGVLGTLELLDLTTLNERQRAYLRTIQSSSATLMQLISDVLDVSKIEAGQMALTLAAFNPLDLVREVLGNFAASAMAKDLQFYACIDTEVPAQLIGDVTRIRQVLNNLVNNALKFTDIGRVVLRVKLLSRNDGRALLQWQVADTGIGIAHEQQERLFEAFYQVSGAHHAGGTGLGLSICWHLAEMMGGHLRMVSETGLGSSFSLVLELPEDEQSGLACRPGLLKSACVHVRSPVRELADSVGAWLKAWGCKVSSGEAAPSELETCVLLELLPMAAGPASSPWPGPRVRASMDAPCQPELREDGWRVGLHNLAGIGQALAQALGGDIPEQTPANACARSGRLDLEVLVAEDNPVNQALLREQLEELGCRVSLAGDGRQALQLFDSGRFDLLLSDVNMPNMTGYELTQALRERGETLPIIGVTANALREEGERCRAVGMNSWLVKPITLHTLHELLSEFARAGVVLPAQARDLGPPAQLDDGLSPQVPERMRALFLETMGKDLEAARQAIRRNDPKGLQQDLHRMAGSLAVMRARTLVVMCQGAEEGLLESRLECSAVEIGEVLVHIEQALEFVRKTG

SEQ ID NO: 9720 - protein, 516 aa, Lotus corniculatus var. japonicus
MDGPVGRGGGAGLDIYLPNYKLGKTLGIGSFGKVKIAEHVLTGHKVAIKILNRRKIKNMEMEEKVRREIKILRLFMHPHIIRLYEVIETPTDIYVVMEYVKSGELFDYIVEKGRLQEDEARNFFQQIISGVEYCHRNMVVHRDLKPENLLLDSKCNVKIADFGLSNIMRDGHFLKTSCGSPNYAAPEVISGKLYAGPEVDVWSCGVILYALLCGTLPFDDENIPNLFKKIKGGIYTLPSHLSPGARDLIPRMLVVDPMKRMTIPEIRQHPWFQARLPRYLAVPPPDTMQQAKKIDEEVVQEVVNMGFDRNQLIESLRNRIQNEGTVAYYLLLDNRFRVSSGYLGAEFQETMDSGFNQMHPGEVASSVVGHRIPGYIDYPGVGMRPQFPVERKWALGLQSRAHPREIMTEVLKALQELNVCWKKIGHYNMKCRWVAGIPGHHEGMVNNNTAHSNHYFGDDSSIIENDAVPSSNVVKFEVQLYKTREEKYLLDLQRVQGAQFLFLDLCAAFLAQLRVL

SEQ ID NO: 9721 - protein, 365 aa, Pseudomonas putida KT2440
MKLLQPLQIGPLTLPNRVFMAPLTRLRSLEPGDVPTALMAEYYRQRASAGLIITEATQISFQAKGYSGSPGIHSAEQIAAWKHINEGIHAEGGHSAVQVWHTGRVSHTSLQPGGKAPVAPSALPADARTTLRDAQGNLTRVETSAPRALSEAEIAGIVADFGQAAINACEAGFDFIELHAAHGYLLHQFLTPSANQREDRYGGSVENRARIVLEAVDAAIANWSADRVGIRVFPLGGFNGVDNGEDQEAAGLYLIRELAKRNLAYLHLSEPDWAGGKPLRDEFRQAIRAAYPGVIIAAGAYTAEKGEDLIGRGLIDAVAFGRAYIANPDLVERLRLQAPLNEHRAKFDYANGPEGYTDYPFLKQA

SEQ ID NO: 9722 - protein, 339 aa, Bordetella pertussis Tohama I
MKRKTLTQYLVEQQRSAQALGPEVRLLIEVVARACKAISHAVSKGALGGVLGSLESENVQGEVQKKLDVLSNEILLEANEWGGHLAAMASEEMETIHLIPNRYPKGEYLLLFDPLDGSSNIDVNVSIGTIFSVLRAPHRVAGADVCEQDFLQPGSQQVAAGYAVYGPQTMLVLTIGNGVVGFTLDREMGSWVLTHESMRIPEDTKEFAINMSNMRHWAPPVKRYIDECLAGKTGPLGKDYNMRWIASMVADVHRILTRGGIFMYPWDAREPGKAGKLRLMYEANPMGLIVEQAGGAAIDGTGRILDIQPDKLHQRVSVILGSKNEVERVGRYHAEAHAS

SEQ ID NO: 9723 - protein, 492 aa, Raphanus sativus
MDPYKYRPASSYNSPFFTTNSGAPVWNNNSSMTVGPRGPILLEDYHLVEKLANFDRERIPERVVHARGASAKGFFEVTHDISNLTCADFLRAPGVQTPVIVRFSTVIHERGSPETLRDPRGFAVKFYTREGNFDLVGNNFPVFFIRDGMKFPDMVHALKPNPKSHIQENWRVLDFFSHHPESLNMFTFLFDDIGIPQDYRHMEGSGVNTYMLINKSGKAHYVKFHWKPTCGVKSLLEEDAIRVGGTNHSHATQDLYDSIAAGNYPEWKLFVQIIDPADEDKFDFDPLDVTKTWPEDLLPLQPVGRMVLNKNIDNFFAENEQLAFCPAIIVPGIHYSDDKLLQTRVFSYADTQRHRLGPNYLQLPVNAPKCAHHNNHHEGFMNFMHRDEEVNYFPSRYDPVRHAEKYPTPPAVCSGKRERCIIEKENNFKEPGERYRSFTPERQERFIGRWIDALSDPRITHEIRSIWISYWSQADKSLGQKLASRLNVRPSI

SEQ ID NO: 9724 - protein, 441 aa, Lotus corniculatus var. japonicus
MNQPKIKRRVGKYEVGRTIGEGTFAKVKFARNSETGEAVALKILDKEKVLKHKMAEQIKREVATMKLIKHPNVVQLYEVLGSKTKIYMVLEFVTGGELFDKIVNHGRMCEDEARRYFQQLINTVDYCHSRGVYHRDLKPENLLLDACGNLKVSDFGLSALSQQIKDDGLLHTTCGTPNYVAPEVLNDKGYDGATADLWSCGVILFVLVAGYLPFDDPNLMELYKKISAAEFTCPPWLSFSARKLITRILDPNPMTRITIAEILEDEWFKKDYKPPIFQENGETNLDDVEAVFKDSEEHHVTEKKEEQPTAMNAFELISMSKGLNLENLFDVEQGFKRETRFTSKSPANEIISKIEEAAKPLGFDVQKKNYKMRLANVKAGRKGNLNVATEVFQVAPSLHMVEVRKAKGDTLEFHKFYKKLSTCLEDVVWKTEDDMQKQEAK

SEQ ID NO: 9725 - protein, 401 aa, Shewanella sp. ANA-3
MKQLIRNIVCLGLGLSLGLSISLSSQENAKSYQSDFDYPLLQDVLETVETYYVKTVSKDELVQAAIKGIFEHLDPYSSFLNHQELLDLKDSNRGEYFGFGFEVASDKDHISIIAPFANSPAEQAGIQAGDIIIKLNDTPTTETNLADILNQIKQHSLSNQSIHLTLKHHNDDAQFEVSLKPSTITIQSVTSKLLDGNIGYVRLSSFQENSTEDMVRSLSQWQNAHLTGLILDLRNNPGGLLDQAIKIADLFLAKGRIVSTSGRFFDANSDYYASPQTMLTNVPMLVLINKGSASASEVLAAALQENGRAKLLGETSFGKGTVQSLIPILNDGNAIKLTIAQYNTPRGENIHDIGIVPDIKVATETGSNQKNMAIIDAISARTDVSQDSLVTSAIAWMQHHD

SEQ ID NO: 9726 - protein, 194 aa, Brassica napus
  misc_feature (142)..(142): Xaa can be any naturally occurring amino acid
NISGVRQRHWGSGVADIRRPHWKRRIWLGTFETAEEAARAYDEAAVLMSGRNAKTNFSLNNNNNTGDTSEGKTDISSSSSSSSSLSTILSAKLRKCCKSPSPSLTCLRLDTGSSHIRSLAEIVPGCRSASSRVLTGELRPAXSQEPTSTTASKDDVVGPATEVGGGGEEGLMDEEEKVALQMIEELLIYSYFYC

SEQ ID NO: 9727 - protein, 736 aa, Sinorhizobium meliloti
MTVPPGKDPAPAPPGMLPAPEIAAILSGTHSNPFAVLGVHAAGKTYVARCFVPGAETVIAETLSGKELGTLERRDEAGFFEGPVALRKEQPIRYRARNDGGEWTVIDPYSFGPVLGPMDDYYIREGSHLRLFDKMGAHPIRHDGAEGFHFAVWAPNARRVSVVGSFNDWDGRRHVMRLRVDTGIWEIFIPGVPVGTPYKYEIVDSNGTLLPLKADPFARRSELRPDTASMTADEIAQNWEDEAHRRHWAEIDPRRQPISIYEVHAASWQRRDNGDMLTWDELAERLIPYCVDMGFTHIEFLPISEYPYDPSWGYQTTGLYAPTARFGEPEGFARFVNGCHKVGIGVILDWVPAHFPTDEHGLRWFDGTALYEHADPRQGFHPDWNTAIYNFGRQEVVAFLVNNALYWAEKFHVDGLRVDAVASMLYLDYSRKHGEWVPNEYGGNENLEAVRFLQTMNTRIYGIHQGVLTIAEESTSWPKVSHPVHAGGLGFGFKWNMGFMHDTLQYLSREPVHRKFHHNDMTFGLLYAFSENFVLPLSHDEVVHGKGSLIAKMAGDDWQKFANLRAYYGFMWGYPGKKLLFMGQEFAQWREWSEDRGLDWNLLEYNLHEGMRRLVRDLNGTYRSKPALHARDCEGDGFEWLIADDRENSVFAWLRKAPGEKLVAVVTNFTPVYREHYDIPLPVAGRWKEVLNTDAEIYGGSGKGNGGAVHAEKRANGETIATITLPPLATLMLEQD

SEQ ID NO: 9728 - protein, 251 aa, Vitis vinifera
MDSDHEEFSASSSSSSSRTNPNSSDSLLPLQCIGHKRKAGRKKFRETRHPIYRGVRQRNGNKWVCEVREPLKKSRIWLGTFPTPKMAARAHDVAALALRGRFASLNFPDSAWRLPRPKSSSAEDIQVAALEATKAFNPTAPSSSSLASALDNMSGVADSKKVLETSPNVESPKLKSQRMVLEVSPVDTKRSEKVGDGSTTVSMDEEAMFNMQGLINSMAEGLLLTPPAMCKGFSWDDATDSHIDLSLWNDD

SEQ ID NO: 9729 - protein, 164 aa, Magnetospirillum magnetotacticum MS-1
MIPWGRSNGNQVPSVLRDGDRDPFLSLHREVNRLFDDVFRGFGSNLPSLVGASAFSGGWPNVEISDGEKEIKVTAEVPGLEEKDIEVLLDDGVLTLKGEKRSETEDKDRQFSERFYGRFERRIPLGYEVKDDKVDARFRNGVLTVTLPKSEKAQSQVKRIAIKS

SEQ ID NO: 9730 - protein, 333 aa, Rhodobacter sphaeroides 2.4.1
MKPFPTHPDAIPAELQDVMDRLGSVAIEVANRIARGGIDEDLAGLCGTNTDGDGQKALDVIADDAFRVALEGSAVRFYASEEQDTAVTLNEAGTLALAIDPLDGSSNIDTNLSVGTIFAIWPAAATAEASFLRLGSELIAAGYVIYGPQVCMMVSFGKGTQKYVLDPGSRSFVLVDRAVKVPPSSTEFAINASNYRHWPKPIRAYIDDCVAGTEGPRGRNFNMRWLASLVAETHRILARGGVFLYPRDSRKGYEQGRLRYLYECAPIAFVITQAGGGATDGENPILGQTPSRLHARTPFVFGSAEKVARITAYHDLPEQETSALFGNRGLFRS

SEQ ID NO: 9731 - protein, 292 aa, Leuconostoc mesenteroides subsp. mesenteroides ATCC 8293
MDYKTLASGIEMPLLGFGVFQVQEKGAAKQAVLDAIKTGYRLIDTAASYGNEREVGEAILEAINQGIVKREELFVTSKMWVQDVSAQQATAAIQSSLQRLNLDYLDLYLIHQPYNDVFGAWRAMESAYRSGQLKAIGVSNFDIAQLTNLAEFSDIKPMLNQIEVNPFQQNKKDITYFSQYGVQVEAWAPFAEGKNDLFSNILLRKIADKHHKSIAQIVLRWLTQRNIIVVAKSVKPERMAQNLDIFDFKLTHQELAEIETLDTNSSQFFNHADPDMIKWMANREISYDVTFN

SEQ ID NO: 9732 - protein, 267 aa, Alpinia hainanensis
MEHKADQDRLLGFKGGKLEPPVAAVGRMGRGKIEIKRIENTTSRQVTFCKRRNGLLKKAYELSLLCDAEVALVVFSCRGRLYEYASSSVKSTIEKYKKACKDTTNDGFVSEANAQYYQQEASKLRQQINSIQISNRNLMGESLHSMNLRDLKQLESRLEKGIGKIRNKKNELLFAEIEYMQRREMELQSDNIFLRNKIAETDRVHQQMSMLPSTGATVAYEAMPTYYSGNFMQCKNRSQTNIYPQQRQRTFTSTPMRSKHGAWVLRG

SEQ ID NO: 9733 - protein, 483 aa, Lactobacillus johnsonii NCC 533
MAEVEPNNSHQNKEISNNKKKHLPKYAQFLLTGIAGAAIGAGLTFGIMEVKELKSPFYQVEKVYEQLQGSYYKKVSPQTLRQGAINGMLNSLNDPFSEGLSGANQEQVNNILEGSSFGGVGIQMAVRNNKVVVDSIVADSPASKSTIKPGDEIVAVNNKKVSAAQFSKVAPLVRGKIGTKVTLKLRRANSTFNVTLKRAKISQSSLTKRTEGNATIITITQFDVNTAKDLKSALKSIDTKKYPKLIIDLQDNPGGAMDAALKSASYFLPNNKIIMQYQDRKQKEVIRSDKKLSGGFHTNLKPIILINANTASASEIFTAALVQNHRAVSVGQTSYGKGTVQEVGQTQDSEYKYTIAKWLTPDGTWINQKGLKPTYPVPESSLAKLPQFQSMSILKKSMTGVDVATLQQYLTALGYMPKHVTGVFNDETKNAVIEFQKAHGLTADGIVNGQVQAQLYLAVAQKLQDDNPALKKAMSLNLKEMED

SEQ ID NO: 9734 - protein, 681 aa, Oryza sativa (japonica cultivar-group)
MSASPSSMKRRRRRRGGGADGGVVQAGPARGGQPALAAAARAAGEVGAGVRVGAGGGRAVLPGAGVPVVAQPEPQAPGRLAPAARRQQARHPPLRRRRRRAHRARPQHRRHASLLQPPLRPAVAGEGPPGEGAADGRGHRRAVVQRRPAVRAMGGGRRRRLPVHHVRAVLGQVPVHARPGGALLPPKRIAPGELPARRCPSDELVFEDESERGSNALLARAWSPGWQNADKALAAFLNGPLMDYSVNRKKADSASTSLLSPYLHFGELSVRKVFHQVRMKQLMWSNEGNHAGDESCVLFLRSIGLREYSRYLTFNHPCSLEKPLLAHLRFFPWVVDEVYFKVWRQGRTGYPLVDAGMRDSRATGWLHDRIRVVVSSFFVKVLQLPWRWGMKYFWDTLLDGDLESDRLGWQYISGSLPDGRELDRIDNPQLEGYKFDPHGEYVRRWLPELARLPTEWIHHPWDAPESVLQAAGIELGSNYPLPIVELDAAKTRLQDALSEMWELEAASRAAMENGMEEGLGDSSDVPPIAFPPELQMEVDRAPAQPTVHGPTTAGRRREDQMVPSMTSSLVRAETELSADFDNSMDSRPEVPSQVLFQPRMEREETVDGGGGGGMVGRSNGGGHQGQHQQQQHNFQTTIHRARGVAPSTSEASSNWTWERRRRGARLVASGSVRPLRSLRCR

SEQ ID NO: 9735 - protein, 649 aa, Nostoc punctiforme PCC 73102
MCGITGFWDISKQFSGEHLDETIQKMSKTLLHRGPDDGGIWTDVEVGVALGHRRLSIVDLSPLGHQPMMSANGRYMVVFNGEIYNFLELRRELTQLGHNFRGHSDTEIMLAGFSEWGLDKAIRRFNGMFAFALWDRQKRILHLGRDRLGEKPLYYGWQGSTFLFTSELKALKAHPNFRAEINRDALTQFFRYSYLPAPYSIYQGIYKLPPGTLLSWNGIDAHPDPVTYWSAREVTELGIAEPFMGSESEAVIQLEALLREAVGLRMVADVPLGAFISGGIDSSTIVALMQAQSSQPVKTFTIGFNEEAYNEAKHAKAVAKHLGTDHTELYVNPKEALEVIPKLPFLYDEPFSDVSQIPTFLVSQLAKQQVTVSLSGDGGDELFAGYNRYLFGRKIWQAIGWIPTTVRKNSARALTSVSPQNWNRGFANVNALLPSRIKQPEFGNKLHTFSEIMALPNPTAIYTKLVSHWEDPKALVIDGLEPPTILSNSQNWPHLLDFTQCMMYFDTVTYLPDDILVKVDRASMGVSLEGRIPFLDHRLVEFAWRLPLSMKIRNGQGKWLLRQVLYKYVPPTLVERPKVGFGVPINSWLRGPLRDWAEELLNENRLKNEGFFNPKPIREKWEEHLSGAASWEYRLWDVLMFQAWLEANH

SEQ ID NO: 9736 - protein, 797 aa, Arabidopsis thaliana
MNVRDEGKTTAEKHGGGEENKSPENKWRFNSPLAQVSLMGFVCFCCPGMFNALSGMGGGGQVDPTAANNANTAVYTAFTVFGLLGGGFYNVLGPRLTLAAGCSTYVLYAGSFLYYNHHHHQAFAIVAGALLGCGAGLLWAGEGAVMTSYPPPHRKGTYIALFWSIFNLGGVIGGLIPFILNYQRSSAASVNDSTYIAFMCFMFAGVLLSFGILPATSVIRNDGSRCSAVKYSRPSTEAAAVLRLFLDRKMLLIVPAAWASNFFYSYQFNNVNGLLFNLRTRGFNNVFYWGAQMAGSIAIGYVMDFSFKSRRARGFTGISLVAVIGTIIWAGGLANQHGYSLDKLPEKKLDFKDSGIEFAGPFVLYMSYGLLDAMYQSMVYWLIGALADDSQTLSRYSGFYKGVQSAGAAVAWQVDTRKVPLMSQLIVNWSLTTTAHTDSMETKQSIPLLMPYKMGPFNLSHRVVLAPLTRSRSYGNIPQPNAKLYYTQRTTPGGLLISESCVVSETSLGYPDLPGLWNRDQVEAWKPIVDAVHSKGGIFFCQIWHGGRVFHQDQPNGEAPVSSTDKPLMCKNMYGGQFKPPRRLRSDELPAIVNDFRIAARNAIEAGFDGVEVHGAHGYLIDQFLKDKVNDRSDQYGGSLENRCRFALEVIEAVTLAICRLHGVRRLESRSIRALPGASYEQAWHGVVYGHMVEPRMKTLEGIFECTESLTPMRKAFKGTFIVAGGYSREDGNKAVEEGRTDLVAYGRPFLANPDLTRRFELNEPLNRYDRSTFYTSDPVVGYTDYPFLETTDTTTA

SEQ ID NO: 9737 - protein, 448 aa, Lotus corniculatus var. japonicus
MVLRKVGKYEIGRTIGEGTFAKVKFAQNTETGESVAMKVLDRNTIIKHNMVDQIKREISIMKLVRHPYVVRLYEVLASRTKIYIILEFITGGELFDKIIRHGRLSEAESRRYFQQLIDGVDYCHSKGVYHRDLKPENLLLDSLGNIKISDFGLSALPEQGVSILRTTCGTPNYVAPEVLSHKGYNGAVADVWSCGVILYVLLVGYLPFDELDLTSLYSKIEKAEYSCPPGFPVGAKTLIHKILDPNPETRITIEQIRNDEWFQRGYVPVSLLEYEDVNLDDVNAVFDDAEEQRANQQCDHEDMGPLMLNAFDLIILSQGLNLAAIFDRGQDSMKYQTRFITQKPAKVVLSSMEVVAQSMGFKTHIRNYKMRVEGLSAKKTSHFSVMLEIFEVAPTFYMVDIQKAAGDAGEYLKFYKNFCGNLEDIIWKPPHESTKSKVSKTRSKRRSR

SEQ ID NO: 9738 - protein, 671 aa, Streptomyces avermitilis MA-4680
MSRYPHLLNPLDLGFTSLPNRVLMGSMHVGLEEAERGFERMAEFYAARARGGVGLIVTGGIAPNDAGRPYEGGAKLTTEAEAEQHTAITEAVHREGGKIAMQILHFGRYAYHQDLVAPSALQAPISPFPPHALTDAEIERTIDDYARTARLARQAGYDGVEIMGSEGYLINEFIATQTNRREDRWGGSYENRMRFPVEIVRRVREAVGEDFIIIYRLSMLDLVPGGSSLDEVITLAQAVEAAGATIINTGIGWHEARIPTIATSVPRGAYAWVTKKVMGAVSVPLVTTNRINTPELAEQLLAEGHADMVSMARPMLADPDFVAKAVAGRPEAINTCIGCNQACLDHTFGGKITSCLVNPRACHETELILSPTRLRKRVAVVGAGPAGLACAVSAAERGHDVTLFDAASEIGGQLNVARKVPGKQEFDETLRYFRTQLEQHGVDVRLNTRVTSEQVAAYEEVVVATGVSPRTPEIPGIDHPSVLGYLDVLRDGAPVGDRVAVLGAGGIGFDVAEYLTDSGDKASEDPATYFRSWGVDMDYRAPGGLGAPERPAPPRTVHLLQRKTSKVGAGLGKTTGWIHRTELKHRGVTMVPGVQYDRIDDAGLHITVDGHSQVLEVDTVVLCTGQDPRRDLYQELIAAGHRAHLIGGADVAAELDAKRAIKQGTELAAAL

SEQ ID NO: 9739 - protein, 128 aa, Arabidopsis thaliana
  misc_feature (17)..(17): Xaa can be any naturally occurring amino acid
  misc_feature (101)..(101): Xaa can be any naturally occurring amino acid
  misc_feature (124)..(124): Xaa can be any naturally occurring amino acid
KNIDNFFAENEQLAFCXAIIVPGIHYSDDKLLQTRVFSYADTQRHRLGPNYLQLPVNAPKCAHHNNHHEGFMNFMHRDEEVNYFPSRYDQVRHAEKYPTPXAVCSGKRERCIIEKEEQLQRKPXGDNR

SEQ ID NO: 9740 - protein, 227 aa, Oryza sativa
MGRGKIAIKRIDNTMNRQVTFSKRRGGLMKKARELAILCDADVGLIVFSCTGRLYDFSSSSMKSIIERYQEAGEEHCRLLNPMSEAKFWQREVTTLRQQVQNLHHNNRQLLGEEISNFTVRDLQLLQNQVEMSLHSIRNKKDQLLAEEILKLNEKGSLVQKENSELRKKFNIAHQRNIELHKKLNSGESTSSEQVTRSSKDPGESSTPRDSRVCIDLELSQKEVEDE

SEQ ID NO: 9741 - protein, 132 aa, Glycine max
  misc_feature (30)..(30): Xaa can be any naturally occurring amino acid
  misc_feature (45)..(45): Xaa can be any naturally occurring amino acid
  misc_feature (60)..(60): Xaa can be any naturally occurring amino acid
  misc_feature (85)..(85): Xaa can be any naturally occurring amino acid
  misc_feature (98)..(98): Xaa can be any naturally occurring amino acid
  misc_feature (116)..(116): Xaa can be any naturally occurring amino acid
ENAHVPEKKLHSFKKVSRSMGYGDNDITLXSCSSGSRGYHRACGXTMRYMEVTGLSAEVXREQISIVASVTLCSNISGRILATLXLSPTAAGDELSDXFYTDKDNIFESLARRIHXLRDAFYTIKGGTCNKA

SEQ ID NO: 9742 - protein, 638 aa, Magnetospirillum magnetotacticum MS-1
MCGFAGFLDLTQATPDRERVVRAMAATLLHRGPDDDGAWVDDGAGVALGFRRLAIIDLSPQGHQPMTSHDGRWVISFNGEIYNHEALRARLGEDIGWRGHSDTEVLLQAVSAWGMERALAEFDGMFAFALWDRQDRVLTLARDRFGEKPLYWTQSGGHLLFGSEIKALRAHPAWTGGIDRDALALYMRLGWITAPHTIHSGVFKLEPGHVMRVSEGQISTQAYWSAAECAAGVENGFTGNAEAAADRLEELLRQSVRLRMQADVPVGVFLSGGIDSSITAALMRQLSSEPVHSFTIGFDQSGLDESPHARAVADHLGTIHTEVRISDAEALAQVPRLPLLYDEPFADAAALPTALLAQVTRKSVTVALSGDGADELFGGYGIYRSIPKDWGRLRGLPGGLKSLGALGARQLAEPAEGLAALAGRFAKRRSHPGHRLRREAERLEVQSLAGLLGLHYSRWRGMPALVPGAREAQSLFSAPTPALKDDALATMVLDACGYLPDDLCVKTDRATMGASLEARLPFLALEIAQFAWSLPTGLKIEGETGKAVLRRVLYRHVPRALVDRPKMGFEVPLRRWLNGQLRDWADDLLSEDRLRRQGFLDTALVAQCWREHRSGAKNWQNEIWHALMFQAWLDSVNP

SEQ ID NO: 9743 - protein, 426 aa, Lotus corniculatus var. japonicus
GRVLGQGNFAKVYHGRNLATNENVAIKVIKKEKLKKDRLVKQIKREVSVMRLVRHPHIVELKEVMATKGKIFLVMEYVKGGELFTKVNKGKLNEDDARKYFQQLISAVDFCHSRGVTHRDLKPENLLLDENEDLKVSDFGLSALPEQRRDDGMLVTPCGTPAYVAPEVLKKKGYDGSKADIWSCGVILYALLSGYLPFQGENVMRIYRKAFKAEYEFPEWISPQAKNLISNLLVADPEKRYSIPEIISDPWFQYGFMRPLAFSMKESAVGEDSTIDHFGGEEEEVPELVAAMGKPARPFYNAFEIISSLSHGFDLRSLFETRKRSPSMFISKYSASAVVAKLEGMAKKLNFRVTGKKEFTVRMQGMKEGRKGKLAMTMEVFEVAPEVAVVEFSKSAGDTLEYVKFCEEQVRPSLKDIVWSWQGDSN

SEQ ID NO: 9744 - protein, 140 aa, Triticum aestivum
MVSFEMNDLKKIGLGLTGFGIFFSFLGIVFFFDKGLIAMGNILFLSGLGLTIGLKSTMQFFTKPKNYKGTISFGAGFFLVLIGWPFFGMLLEAYGFIVLFSGFWPTLAVFLQRIPIIGWIFQQPFVTSFLDRYRGKRVPV

SEQ ID NO: 9745 - protein, 508 aa, Haemophilus influenzae Rd KW20
MSSQCPFSHLAATNLTMGNGAPVADNQNSLTAGPRGPLLAQDLWLNEKLADFVREVIPERRMHAKGSGAFGTFTVTHDITKYTRAKIFSEVGKKTEMFARFTTVAGERGAADAERDIRGFALKFYTEEGNWDLVGNNTPVFFLRDPRKFPDLNKAVKRDPRTNMRSATNNWDFWTLLPEALHQVTVVMSDRGIPASYRHMHGFGSHTYSFWNEAGERFWVKFHFRTQQGIKNLTDAEAAEIIANDRESHQRDLYEAIERGDFPKWTLFVQIMPEADAEKVPYHPFDLTKVWSKKDYPLIEVGEFELNRNPENFFADVEQSAFAPSNLVPGIGASPDRMLQARLFNYADAQRYRLGVNYRQIPVNRPRCPVHSNQRDGQGRVDGNYGSLPHYEPNSFSQWQQQPDFAEPPLRINGDAAHWDYRNDDNDYFSQPRALFNLMNAEQKQSLFNNTAAAMGDAPDFIKYRHIRNCHWCDAAYGEGVAKALGLTVEDALKARDTDPALGQGGLL

SEQ ID NO: 9746 - protein, 274 aa, Saccharomyces cerevisiae
MQVKSIKMRWESGGVNYCYLLSDSKNKKSWLIDPAEPPEVLPELTEDEKISVEAIVNTHHHYDHADGNADILKYLKEKNPTSKVEVIGGSKDCPKVTIIPENLKKLHLGDLEITCIRTPCHTRDSICYYVKDPTTDERCIFTGDTLFTAGCGRFFEGTGEEMDIALNNSILETVGRQNWSKTRVYPGHEYTSDNVKFVRKIYPQVGENKALDELEQFCSKHEVTAGRFTLKDEVEFNPFMRLEDPKVQKAAGDTNNSWDRAQIMDKLRAMKNRM

SEQ ID NO: 9747 - protein, 333 aa, Cryptococcus neoformans var. neoformans B-3501A
MAPASHFTFNNGKKIPSIGLGTWQSEPGQVAKAVESALKSGYRHIDCAWAYGNEKEVGEGLKASGVPREEIHITSKLFELHHHPEHVELACKDTLKNLGVEYLDLYLLHWNINFQVDAPKGTVPTFDHAVKADNGKIKLDVALADNVMPTWREMEKLVEKGLVKSIGISNFNIHRTEKLLKEAKIKPVADQVELSIQCPQHELVAYLKSKDILPQGYSPLGGTGKSNLRENDVVQKIADKYKVQTANILLSWLVMRGINPVPKSVTPERIANNLKLVDLSQEDFKELEKLAESHPPKRVCDQSEDFEPKYDIFQENDPEFSDKAQFAKLGLKL

SEQ ID NO: 9748 - protein, 564 aa, Xanthomonas axonopodis pv. citri str. 306
MCSIFGIFGLQPGDDLQALRRQALECSQRQRHRGPDWSGVYVDTGAILVHERLAIVDPAGGSQPLLSEDGQLALAVNGEIYNHRELKAELLQPYAFQTGSDCEVINALYREDTPASYLNRLNGIFAFALWDKTEGRVIIARDPIGVVPLYWGHDREGRLRVASELKSLVDDCADAAQFPPGHWYDSATGALNRYYERAWRQYGAVEGVQVQLQELREAFERAVHRQLMTDVPYGVLLSGGLDSSLVAAVAARYARHRIEENDITEAWWPRLHSFAIGLKGSPDLAAAEVAAAALGTVHHGFEYTFDEGLDALPDVIRHIETYDVTTIRASTPMFLLARRIKAMGVKMVLSGEGSDEIFGGYLYFHKAPNAREFHEELVRKLDALNNYDCLRANKSMMAWGVEPRVPFLDREFLDVAMRMDARFKMIDKTSSGATRMEKGVLREAFAGYLPESILWRQKEQFSDGVGYGWIDGLKAHAQSQVSDRELAAADRRYPVNPPQTKEAYFYRSLFEQFFPGQAAAETVPGGKSIACSSPTAIAWDASFAAMADPSGRAIAGVHAQALAS

SEQ ID NO: 9749 - protein, 730 aa, Ralstonia eutropha JMP134
MGALVEGRHRDPFAILGPHRDGDTLIVRACVPGAHSVMLADSRGEPLAPMTPLHAGGVFTGRLPAGVSVYQLLVRWHNGTQQVSHDPYAFGLLLGELDLHLIAEGRHFELGACLGAQWRNVDGVQGVRFAVWAPNARRVSVIGDFNGWQPARHPMRLRHPSGVWELFIPEAMGARPGCRYKFDLLDPHDAQLPDKADPLALATEAPPATASVVTQPQVSAPPFAWQDDEWMRLRNAVDPYAAPLSIYEVHVGSWLRAANDPARGWEVLADRLIPYVHELGFTHIELLPVTEHPFGGSWGYQPLSLYAPTARLGPPQAFAAFIDRCHRDGIGVILDWVPAHFPTDPHGLARFDGTALYEHEDPREGFHQDWNTLIYNLGRNEVRGFLLAGALHWLEHFHVDGLRVDAVASMLYRDYSRAPDQWVPNRFGGRENLEAVAFLRELNTVVHERCPGALTIAEESTAWPGVTASAASGGLGFDFKWNMGWMHDTLRYLSLDPIHRAWHHQDMTFGTVYAWSEAFVLPLSHDEVVHGKGSMLRKCPGDDWQRFAGLRAYYGFMWAHPGKKLLFMGGELAQWQEWNHDAELDWALLDHPMHRGVHTLVRDLNALYRELPALHELDHSPAGFQWVVGDDHQNSVFAWLRRPAPGSGDVVLAVTNMTPVPRYGYRIGVPSEGCWHERLNTDAACYGGSNLGNGGAVTAEPVPSHGQEASVLLTLPPLATVILQHAGTQA

SEQ ID NO: 9750 - protein, 661 aa, Ralstonia eutropha JMP134
MNLTSFFLGTGATSATPRLAPLDSFSASAPQVPAANDDPHSYAFGPVWLPEGRIGFRLWAPDAAQRGESVRLEIAGMGPVRMTACENGWYRAAVPCADGTRYWFRLDDGTTFPDPASRWQPNDVHGPSVACQPKARTYPWKCPDWRGRPWHEAVICELHVGLCGGYAGAMAQLQRLSALGFTAVELMPLAEFPGARNWGYDGVLPFAPESGYGKPDDLRALVDEAHSLGMMVLLDVVYNHFGPEGNYLHHYASAFFRQDRQTPWGPALDFRRREVRRFFTENARYWLEEFRFDGLRLDAVHAIDDEGWLTTLPSDLRALHGLQGRHVHLVLENDHNDASLLSAGFDAQWNDDAHHALHVLLTGEQDGYYRDYGATPGRPANTSQNAGQNTPLRHLARVLREGFAYQGEVSPYRSECDPAQGPVRRGKPSGHLPPTAFVSFLQNHDQIGNRAFGDRLATLADPDALRVAVALQLLCPQVPLVFMGEECGAQTPFYYFTSHPPELAEAVRQGRRQEFAGMAAFRDESQALEIPDPNDPATFEASRPPMDVENDWTRYYRRLLAIRREWLMHRLPRARISGVDVLGPAALRARWRLGDGTCLSIWVNLGEHVAACQPPAPGYAVLHETASGHADAVAGGSLPAMSCIAILSGHGEQAHGAGGAR

SEQ ID NO: 9751 - protein, 1679 aa, Aspergillus nidulans FGSC A4
MSELWYQRPAAGWDEALPVGNGRLGAMVYGRTDTELLQLNEDSVWYGGPQNRLPEDALKCLPRLRELIREGAHKEAERLARRAFFASPNSQRHYEPLGTLFLEFGHPCEEVTGYRRSLDLNEGITHVHYEHNGVQYHRQVIASYPDNVLAMRVQASRCSEFLVRLSRLSELEYETNEFLDDLVVDGQSIKMHVTPGGKDSNRACCMVAIRCGSDDQEPIKVDCVGKNLIINARDALIVIVAQSTYRCDDADLDRATVADLEAVLASSVEDIWARHITDYQSLYGRLELNLGPDATDIPTDQRILHVRGPELVAIYLRYSRYLLISCSRPGRKGSSDRVLPATLQGIWNASFHPPWGCRYTININLQMNYWPANVGNLLECEEPLFALLERLAVTGTETARKMYGCRGWTVHHNTDLWADTAPVDRWMPATLWPLGGAWLCTHVWERFLFNGNKAFLKRMFPVLRGCVEFLQDFLVDDVSGQYKVTNPSLSPENTFRDEKGQEGVLCEGSTIDIQLVRAVLKAFVESLEVLGYSQDELLPSVHDTLRRLPPARIGSKGQLQEWMFDYDENEPGHRHVSHLWALYPGNDINLETTPELAKACAVTLQRRQAAGGGHTGWSRAWLLNLHARLRDADECAEHLERLLAQSTLPNLLDTHPPFQIDGNFGGGAGILEMLVQSHEDGIIRLLPACPLAWRSGRLRGVRARGGFELEFEWKDGVIRGPEASAFFYTSHSRCEDSTTYGKHNALGISTIMDLTSVQDLKGALRNDFFHGYATAAAQVEGAWNKDGKGPSIWDTFGHTPGKVKDNSNADDAVRFYDFYREDVALMKSYGVNAYRFSLSWSRIIPLGGADDPVNEQGIKYYQDLVDELLNNGITPFVTLFHWDVPQALEDRYGGMLNQERFIPDFVRYARVCFERLGPKVRHWITFNEPGVYSLAGYAAGVHAPARSSFRELNEEGDSSTEPFIVGHTELVTHGHVSKLYREVFQPQQKGTIGITLHGNWSEPWDEDDPRDQEAAERAREFEIAWFADPLYKTGDYPASMRAQLGDRLPRFTPEESKLVLGSSEFYGMNSYTTFFVQHKDTPPDINDHKGNVIVHDTNSKGVSRGEESDTPWLRTAPTGWRKLLNWIWNRYHVPIYVTENGTTAKGETAPTPEVLIDTFRMRFFEGYVGGLARAVKEDGVDIRSYFAWTFTDNWDRKGPIQMVEIFRRSYASTVRPATAPRPSPNVKHVRENAELYAQNCRDRNYPAHAEYPFKIQQLSEELRQIDKQLMPFRSRIKALERTIGRLQNPATGPEEKEQEPAIRAEAQQLKNESAALITRRELCDEQIHDLALSLPNLTSPHTPVGLEPALVEYLNFDPQSPPAWVSSPDPLRSHVSIGTDLGLIDFTSAATTTGWGWYFLTGDGALLEQALIQYSLSVARRHGWTPISPPSIVWSYLTEACGFQPRDQNNEQQIWAIEQAEKDKAKPPRSLAATAEIPLAAMHARNELDPAALPIKLVGPSRCYRAEAGSRGVDTKGLYRVHEFTKVEMFGWADSSPTSSSPTSDDLFEGLLTVQKEILTSLQLPCRILEMPTSDLGASATRKRDIEALFPSRMRGNGLEDAWGEVTSASICTDYQSRRLGTRVRGVKSVFPHTVNGTAVAVPRVLAAILENGWDAERKVVVLPEVLRPFMGGAEVIGK

SEQ ID NO: 9752 - protein, 354 aa, Pseudomonas putida
MTKLFSPVQLGPLNLPNRVVMAPMTRSRALGNVPNDLMAQYYSLRAEAGLLITEGTSPSPNGLGYAHIPGIYSDAQVAGWRQVAEAVNAAGGRVFVQLMHTGRVGHPANLPLGAHLLAPSAVAAPGEMWTDTEGMQPHPVPGTMTEQDIAAAIEEYAAACKNTVAAGFDGVELHGANGYLIDQFLNTASNHRSDRWGGSIDNRIRFAVEVARAAAAAIGAERVGIRISPYGVFNGMASDADMDALYLRLIEALNDVGLVYLHVVDHSSMGAPPVSETLKVQLRTAFRGKYILSGGYDAARTNADLAANKGDLVAFGRPFIANPDLAQKLKSGGELKPADPATFYTPDAKGYTEF

SEQ ID NO: 9753 - protein, 638 aa, Streptomyces verticillus
MRPVCGIVAIRSADGGLDGGELTAPMADLRPRGPDGEGTWVSPTGRAALGHTRLAVIAPDAGRQPVAGPDGTVRLVVNGEFYGYREIRAELRAAGCRFRTGSDSEIALHLYLRDGRRALERLRGEFAFVLWDERRATLFAARDRFGVKPLYYTERDGRLYVASTVRALLSCGAPARWDTAAFAAHLQLGLPPDRTLFAGIRQLPPGCHLIADAHGTRVTPYWDLDYPPAGELAARGSLDDHLDAVRERTDEAVRLRTVADVPLACHLSGGLDSSAVAASAARHTRLTAFTVRFDDPAFDESAVARRTAAHLAIDHREVASERAHFADHLRDVVRAGEMVQENSHGIARYLHSAHIKKAGFTAVLAGEGGDELFLGYPQFRKDLTLSLSADARDKADRGYARLVAAGLLPPYLRTLLGTLGFLPSWIVDRHLAVTQPVAALLRPDFAAELARADAAAPLLAAGAGLLAGRAPAHQATYLFAKTWLPGYLLAAERLDAAQAVEVRLPLFDHHLFDLVRHTPPAWYDKDGTGKYPLRAAMRHRLPREVTEGRKQGFLAPPMADDDTLLDALRERLAGPGAGDDPFFDPHAVRALLDRLAAAPPGQRSGGEKLLQLVASTAELADEFGLTTAPSGQKGGNGG

SEQ ID NO: 9754 - protein, 513 aa, Arabidopsis thaliana
  misc_feature (500)..(500): Xaa can be any naturally occurring amino acid
MDHSSNRFGNNGVESILPNYKLGKTLGIGSFGKVKIAEHVVTGHKVAIKILNRRKIKNMEMEEKVRREIKILRLFMHPHIIRQYEVIETTSDIYVVMEYVKSGELFDYIVEKGRLQEDEARNFFQQIISGVEYCHRNMVVHRDLKPENLLLDSRCNIKIADFGLSNVMRDGHFLKTSCGSPNYAAPEVISGKLYAGPEVDVWSCGVILYALLCGTLPFDDENIPNLFKKIKGGIYTLPSHLSSEARDLIPRMLIVDPVKRITIPEIRQHRWFQTHLPRYLAVSPPDTVEQAKKINEEIVQEVVNMGFDRNQVLESLRNRTQNDATVTYYLLLDNRFRVPSGYLESEFQETTDSGSNPMRTPEAGASPVGHWIPAHVDHYGLGARSQVPVDRKWALGLQSHAHPREIMNEVLKALQELNVCWKKIGHYNMKCRWVPGLADGQNTMVNNQLHFRDESSIIEDDCAMTSPTVIKFELQLYKAREEKYLLDIQRVNGPQFLFLXDLCAAFLTELRVI

SEQ ID NO: 9755 - protein, 302 aa, Synechococcus elongatus PCC 6301
MQRIGLAAKLIARRLSHAGLVDDALGFTGEINVQGEAVKRMDVYANQVFISVFRQSGLVCRLASEEMEKPYYIPENCPIGRYTLLYDPLDGSANVDVDLNVGSIFAVRRQEFYDESHEAKDLLQPGDRQIAAGYVLYGASTLLVYSMGQGVHVFVLDPSLGEFVLAQSDIQLPNSGQIYSVNEGNFWQWPEGYRQYIREMHRREGYSGRYSGALVADFHRILMQGGVFLYPETVKNPTGKLRLLYEAAPMAFLAEQAGGKASDGQKPILLRQPQALHERCPLIIGSAADVDFVEACLAESVP

SEQ ID NO: 9756 - protein, 425 aa, Nostoc punctiforme PCC 73102
MGYYIAPRFLDKLAVHITKNFLKLPGVRVPVILGIHGRKGEGKTFQCQLVFEKMGIEVTHVSGGELESPDAGDPARLIRLRYRETAELIKVRGKMCVLMINDLDAGAGRFDEGTQYTVNTQLVNATLMNIADNPTDVQLPGSYDSTPLHRVPIIVTGNDFSTLYAPLIRDGRMEKFYWEPDRDDKVGIVKGIFEPDGLSQKEVEQLVDTFVNQSIDFFSALRSRIYDEQIRNYIHQVGFERVSLSVVNSTEGPPEFKKPDFRLSHLIESGNFLVGEQKRVENSHLVDDYNRLNRGRNSQSASPAATPINQPSSNGATQEAKTNGNGFQKQEGLSSHLTLDTQAQIRQLLSQGYKISIEHVDERRFRTGSWQTCVHSHIDAESDAISNLEATLAEYSGEYVRLVGIDPKAKRRVVETIIQRPDGKN

SEQ ID NO: 9757 - protein, 493 aa, Rhodopirellula baltica SH 1
MSEESKCPFQTQQFGRAVDDNQHSQTAGPRGPVLMQDVHLVEKMAHFNRERIPERVVHAKGFGAFGTFTVTNDITKYCMADLFSEVGKKTETFARFSTVGGESGSADTARDPRGFSLKFYTDQGVWDLVGNNTPIFFIRDPLKFSDFIRTQKREPQNHLQPHWRRWDFWGEVPEALHQVMFLYSDRGTPKSARFMNGYGSHTFSMYNKDGVRHWVKFHLKTEQGSENFSADEAIKMAGEAPDYSTRDLFEAIEKGDFPRWRMHIQVMPESDAADYEWHPFDLTKVWPHDDYPLIEVGVFELNRNPSNYFQDVEQAAFEPGNLVEGIGISPDRMLQNRVLSYPDAHRYRLGVNYHQIPVNQPRCPYATYHRDGTMRVDGNGGGTVDYEPNKMNGPKETGRTMEPPMPVHGDGDRYDEFACDDKDYYGQPQMFWNKVLDEGARERLCTAISNSMADSPENIREKMLAQFGKVHPDFEEGVRSRLDAPKSQPIPIA

SEQ ID NO: 9758 - protein, 375 aa, Bacillus cereus ATCC 10987
MTSSNNKAASIYEGTNINAGGSFENIEETKLFNPIQIGSWSLRNRIAMAPMTRCFANHETGVVGTDVVEYYRKRAADGVGLIITEGIVISPRAKGNPGVPGIYTQEQIDSWKPVTEAVHKEGGTIIAQIWHVGRMSHHEIIGGQMPQAPSAIAAEGNVPRFRKPFDTPEAMTLEEIQAVIGQYAQAAKNAIEAGFDGVEIHGAHGYLIDQFTYEFANKRTDKYGGDLKERLTFMKEVTAAVIEAVGANKTLLRFSAFKGDNPTYMWENPELAIETFVNMFKEVGLTMIHPSTMNYTAVIADGKNFHQLVRKYWDGTIVGVGNLNPKEAEEALQEGIIDVAAFGRPLIANPDFVHRIKNAESLVEYDAKEHLATLV

SEQ ID NO: 9759 - protein, 371 aa, Candida albicans SC5314
MLIKSNYNCINIKRFLLNQTRVSVTASNSFSFYFYFKPYKFNCYKSYSTMSTTTPTIKLNSGYEMPIVGFGCWKVTNATAADQIYNAIKTGYRLFDGAEDYGNEKEVGEGINRAIKDGLVKREELFIVSKLWNNYHSPENVEKALNKTLTDLNLEYLDLFLIHFPIAFKFVPLEEKYPPGFYCGDGDKFHYENVPLLDTWKALEKLVNLGKIKSIGISNFNGGLIYDLIRGATIKPAVLQIEHHPYLQQPRLIEFVQNQGIAITAYSSFGPQSFLELQSKRALDTPTLFEHETIKSIADKHGKSPAQVLLRWATQRNIAVIPKSNNPDRLAQNLAVVDFDLTEEDLQAISKLDIGLRFNDPWDWDKIPIFV

SEQ ID NO: 9760 - protein, 365 aa, Methanosarcina barkeri str. fusaro
MIFDPITVCNLELQNRFVRSATHEFLAEEDGTPTSKLEDLYEELAKNEVGMIITGYSYVLPGGQSDIYQQGIYDDRFIEPYKKITEKVHRYRSKIVLQIVHGGRQASVSDEYPVPMAPSEVKDSHSAVVPREMTEQEILKVIEAFTKATVRAKKAGFDGVQLHCAHGFLLSNFISPYTNRRTDRWGGSVENRTRIVTEIVRRIKEEAGDSFPILVKMNATDGFQPCCSKAELGLDIFQAVEIAKLLEKAGVCAIEVSGGIGEAGGVTIRTAINTPAKEAYFRDCSKAIKSAVNIPVILVGGIRSLSVINDLLENGSADMISMSRAFISEPDIVLKFKSGKVKKARCVSCNLCFDPEGISCNFQFE

SEQ ID NO: 9761 - protein, 258 aa, Pseudomonas aeruginosa PAO1
MIQIDALPAFNDNYIWLLQDATSRRCAVVDPGDAKPVEAWLAAHPDWRLSDILVTHHHHDHVGGVAALKELTGARVLGPANEKIPARDLALEDGERVEVLGLVFEIFHVPGHTLGHIAYYHPAETPLLFCGDTLFAAGCGRLFEGTPAQMHHSLARLAALPANTRVYCTHEYTLSNLRFALAVEPDNAALRERFEEATRLRERDRITLPSEISLELSTNPFLRVSENSVKKKADQRSGQQNRTPEEVFAVLRAWKDQF

SEQ ID NO: 9762 - protein, 397 aa, Lotus corniculatus var. japonicus
LKKERLVKQIKREVSVMRLVRHPHIVELKEVMATKTKIFMVVEYVKGGELFAKLTKGKMTEVAARKYFQQLISAVDFCHSRGVTHRDLKPENLLLDDNEDLKVSDFGLSSLPEQRRSDGMLLTPCGTPAYVAPEVLKKKGYDGSKADIWSCGVILYALLCGYLPFQGENVMRIYSKSFKADYAIPEWISPEAKNLISKLLVVDPEKRYSIDEIMRDPWFEIGFMRPLAFSMKASAVDDTVIDFNDDVVEDLDPKSDVGGGEFVEAARPSYNAFEIISSLSHGFDLRNLFETRKRSPSTFISKLSASAVVAKLEAVAKKLNLRITGKKEFMVRMQGVTEGRKGKVGMTVEVFEVAPEVAVVEFSKNAGDTLEYIKLCEDQVRPSLNDIVWSWQGQGSS

SEQ ID NO: 9763 - protein, 568 aa, Candida albicans SC5314
MVLSKHIDALRLESQILKKTPQAQLRKEAFIDAYDSHKNIPQFEIPQNSSNEQLIYKYLSQELALDGIPTLNLASFVNTYVDDTSARLIQDNLTKNLADNDEYPSLIDIQTRCISILSNLWHAPGKVDKVTGNRVTNSIGTATTGSSEAIMLAGLALKKRWQLKRKAEGKSTDNPNILMATCAQVALEKFACYFDVENRLIPVTEESGHLIDVSKIKENIDENTIGIFVIMGSTFTGAFEPVEEISKLLDEVEKERGLDIRIHVDGASGGFVAPFIFPHLKWDFAVPRVDSINTSGHKFGLTSVGLGWVIWKDADLLPKELRFSLDYLGGVEETFGLNFSRPGFPVITQYYNFLSLGRQGYAKIFDGCMTNARLLSRFLEESKYFDVVSVIHHKLSDSEKKAQFIREVDDKKLDSKLYTINEEFKPGLPVVAFRFSKEVRDKYPELPQELLSTLLRKRGYIIPNYHLPPSENDKEILRVVVRNSLSLNLLERLIQDITDATELLIKAADSIADYVSTSGEHTDVENRERIHKLLAAIASGGVAEVKEEKHKKDNHQGSKNKKSYRGTC

SEQ ID NO: 9764 - protein, 372 aa, Annona cherimola
YETDPYHPITNPRGVIQMGLAENQLCSDLIEEWVRRNPSSSICTPEGASEFKEIAIFQDYHGLPAFRKAVANFMEKVRGGRAKFDPDRIVMSGGATGAHELIAFCLADPGDAFLVPTPYYPGFDRDLRWRTGVQLVPVECHSYNNFKVTRSALEAAYMKAQEENIRVKGLLITNPSNPLGTILDRETLESIISFINEKSIHLVCDEIYAATVFSSPPFVSIAEILTDVPHCNLDLVHIVYSLSKDLGLPGFRVGVVYSYNDHVVRIGRKMSSFGLVSTQTQHLIASLLSDDAFVNKFIVESARRLAERHSTFTRELARVRISCLKSNAGLFCWMDLRALLKEPTVEGEMELWHTIVNVIKLNVSPGASFHCS

SEQ ID NO: 9765 - protein, 324 aa, Neisseria meningitidis MC58
MDTLTRFLPEHLQQNQLPEALGGVLLSVVSACTEINAKVRLGALAGVLGMAGTGNIQGEDQKKLDVIANNIMIDTLKANSAVAGLASEEEDTFVNAGENGRYLVLFDPLDGSSNIDVNISVGTIFSILEKPEGALATESFLQTGRQQLAAGYVLYGPQTQLVFTFGHGVYMFTLNAENEFVLTKENPKVPESTKEFAINMSNRRHWLPPVQQYIDELLAGETGTRGKNYNMRWVASMVAEIHRILMRGGVFMYPQDKRDPAKPGKLRLMYEANPMSLILEQAGASASNAYQAMLDIQPENLHQRVAVFMGSSEEVAYLDRLHAK

SEQ ID NO: 9766 - protein, 444 aa, Kluyveromyces lactis NRRL Y-1140
MSNEEFIRTQIFGTVFEITNRYTNLNPVGMGAFGLVCSATDTLTSQPVAIKKIMKPFSTSVLAKRTYRELKLLKHLRHENLICLEDIFLSPLEDIYFVTELQGTDLHRLLQTRPLEKQFVQYFLYQILRGLKYVHSAGVIHRDLKPSNILINENCDLKICDFGLARIQDPQMTGYVSTRYYRAPEIMLTWQKYNVEVDIWSAGCIFAEMIEGKPLFPGKDHVHQFSIITDLLGSPPKDVIDTICSENTLKFVTSLPHRDPVPFSSRFQNLEPDAIDLLEKMLVFDPKKRITAADALAHPYLSPYHDPTDEPIAEAKFDWNFNDADLPVDTWRVMMYSEILDFHQIGDPQINTNATFDDQVAAATVAAAEAASKQQQQQQHQTEEQTQQTIASTPPQAQVTPQQLESGANSNSNSNPSFSIGPDPANETLTNFANQADQYVSKFK

SEQ ID NO: 9767 - protein, 417 aa, Nocardia farcinica IFM 10152
MGHVSPHLPHRPPRVLEQSTKLQNVVYEIRGPVHAHAARLEAEGHRILKLNIGNPAPFGFEAPDVIMRDIIAALPYAQGYSESKGILSARRAIVTRYELVPGFPEFDVDDVYLGNGVSELITLTMQALLDNGDEVLIPAPDYPLWTAMTSLAGGTPVHYLCDESNGWQPDIADIEAKITDKTKALLVINPNNPTGAVYSAEVLQQIVDLARKHQLLLLADEIYDKILYDDAKHISLATLAPDLLCLTFNGLSKAYRVAGYRSGWMVITGPKEHATGFLEGIDLLATSRLCPNVPAQHAIQVALGGHQSIEDLILPGGRLLEQRDVAWERLNMIPGVSCVKPKGALYAFPRLDPEVYEIHDDSKLILDLLLQEKILMVQGTGFNWPAHDHLRIVTLPWARDLAVAIERFGNFLASYRQ

SEQ ID NO: 9768 - protein, 614 aa, Oceanobacillus iheyensis HTE831
MCGITGFVNWGKTADEQRSVLGKMTDTLSLRGPDDTQLWTKGHTGFGHKRLSVVDLEGGKQPMSKTVNGITYTVCYNGELYNTEDLRKELLKRGYTFSTTSDTEVLLTSYIEWKEACVDHFNGIFAFGIWDEEKEQLFMSRDRLGVKPLFYAEKAKGFIFGSELKAILAHPDISTKVDRTGLSEIFGLGPSRTPGHGLFKDIDELRAAHSLTFSKHGLKVWRYWNMVSNHHTDSEEETAEKVRELFVDAVQRQLVADVPVSTLLSGGLDSSAITAIAANYYKEKGYGPLTTFSIDYQGNEQHFQKSKFQPSSDRAWIEKMVEGFSTDHHDEIIAGQELAILLKEAVEVRDQPGQADIDSSLLWFCREIKQHTTVALSGECADEIFGGYPWFHDPAAAGNNFPWIRSLDSRIDLLHGDWKKKLDLESYVQEQYQSTIAETPRLDGEDKIDAKRRELFYLNMQWFMSQLLDRKDRMSMGASLEVRVPFADHRLVEYVWNIPWDIKMVNGHEKGILRKAMEGILPNEVLYRKKSPYPRTFQPEYTEQVSQWMNRILVDPNARLFEFMKKEKVEAIVKSKGKEFKDPWYGQLMRGPQLIAHLCQIDHWLRQYDVEVVD

SEQ ID NO: 9769 - protein, 372 aa, Bacillus subtilis subsp. subtilis str. 168
MNPKYKPLFEPFTFKSGVTINNRIAVAPMTHYASNEDGTISEAELDYIIPRSKEMGMVITACANVTPDGKAFPGQPAIHDDSNIPGLKKLAQAIQAQGAKAVVQIHHGGIECPSELVPQQDVVGPSDVFDNGKQIARALTEEEVENIVKAFGEATRRAIEAGFDGVEIHGANGYLIQQFYSPKTNQRTDRWGGSDEKRLAFPLAIVDEVKKAASEHAKGAFLVGYRLSPEEPETPGLTMTETYTLVDALGDKELDYLHISLMDVNSKARRGADPTRTRMDLLNERVGNKVPLIAVGSIHSADDALAVIENGIPLVAMGREILVDPNWTVKVKEGREKQIETVIKGTDKEKYHLPEPLWQAIVNTQGWVPYKD

SEQ ID NO: 9770 - protein, 355 aa, Lycopersicon esculentum
MESTDSSTGTRHQPQLPPGFRFHPTDEELIVHYLKKRVAGAPIPVDIIGEIDLYKFDPWELPAKAIFGEQEWFFFSPRDRKYPNGARPNRAATSGYWKATGTDKPVFTSGGTQKVGVKKALVFYGGKPPKGVKTNWIMHEYRVVENKTNNKPLGCDNIVANKKGSLRLDDWVLCRIYKKNNTQRSIDDLHDMLGSIPQNVPNSILQGIKPSNYGTILLENESNMYDGIMNNTNDIINNNNRSIPQISSKRTMHGGLYWNNDEATTTTTTIDRNHSPNTKRFLVENNEDDGLNMNNISRITNHEQSSSIANFLSQFPQNPSIQQQQQQQEEVLGSLNDGVVFRQPYNQVTGMNWYS

SEQ ID NO: 9771 - protein, 255 aa, Brassica napus
GDIHGQYQDLLRLFEYGGYPPSANFLFLGDYVDRGKQSLETICLLLAYKIRYPSKIYLLRGNHEDAKINRIYGFYDECKRRFNVRLWKIFTDCFNCLPVAALIDDKILCMHGGLSPELDNLNSIREIQRPTEIPDSGLLCDLLWSDPDQKIEGWADSDRGISCTFGADKVAEFLDKNDLDLICRGHQVVEDGYEFFAKRRLVTIFSAPNYGGEFDNAGALLSVDESLVCSFEIMKPALASSSGHPLKKVPKMGKS

SEQ ID NO: 9772 - protein, 407 aa, Synechococcus elongatus PCC 6301
MIQPFLKRSLLWLTLLFWFATATPALALTEEQKLFNEAWRIVNQSYVDPSFNHSNWFQLREKILKKPLDNRDQTYTAIEGLLAKLDDPFTRLLRPDQYRNLQVSTAGELSGVGLQIGFEAESGDVVVIAPIEGSPAALAGLLSGDRILTVDGVAISGRDLDEAAARMRGPRGTTVALQVLRDQQTLDFELVRDRISLNPVRSQLDRDGDHPPIGYIRLSQFNANASVEVAHAIAQLDQQGAEAFVLDLRNNSGGLLTAGIEIAREWLNEGAIVYTVNRQGVLDSFAANGQALTDKPLALLVNRGTASASEILAGALQDNERAILVGDRTFGKGLIQSLFELSDGAGLAVTVAEYETPNHNDINKQGIQPDLAVEQSEPLFAEAIASAAVRQYQAAVTALTEQVRHRA

SEQ ID NO: 9773 - protein, 246 aa, Cucumis sativus
MGRGRVELKRIENKINRQVTFAKRRNGLLKKAYELSVLCDAEVALIIFSNRGKLYEFCSTSNMLKTLERYQKCSYGAVEVTKPAKELESSYREYLKLKSRFESLQRTQRNLLGEDLGPLNSKELEQLERQLVSSLKQVRSTKTQYMLDQLSDLQNKEQMLIETNRALQIKLEEISSRNNIRLTWDGGDQSMSYGPQNAQTQGFFQPLECNPTLQIGYTSAVSDQITSTTTPTHAQQVNGFLPGWML

SEQ ID NO: 9774 - protein, 527 aa, Lycopersicon esculentum
MEPNSYGSGKAAVGDGVGAPMLQTAPAPAPIPSANAPPPFLVKTYDMVDDPSTDKIVSWSPTNNSFVVWDPPEFAKDLLPKYFKHNNFSSFVRQLNTYGFRKVDPDRWEFANEGFLRGQKHLLKSISRRKPAHGHAQQQQQPHGNAQQQMQPPGHSASVGACVEVGKFGLEEEVERLKRDKNVLMQELVRLRQQQQATDNQLQGMVQRLQGMELRQQQMMSFLAKAVNRPGFLAQFVQQQNESNKRIAEGSKKRRIKQDIESQDPSVTPADGQIVKYQPGINEAAKAMLRELSKLDSSPRLDNFSNSPESFLIGDGSPQSNASSGRVSGVTLQEVPPTSGKPLLNTASAIAGQSLLPATSEMQSSHLGTCSEIINNQLSNIIPLVGGEDLHPGSLSASDMIMPELSQLQGILPENNTDVIGCDSFMDTSAVEGKVGLDIIGSCLSPGADIDWQSGLLDEIEEFPSVGDPFWEKFLQSPCSPDAAMDDDISNTSETKPQINGWDKTQNMEHLTEQMGATNIKQQKHMI

SEQ ID NO: 9775 - protein, 154 aa, Lycopersicon esculentum
MSLIPRIFGDRRSSSMFDPFSIDVFDPFRELGFPSTNSGESSAFANTRIDWKETPEPHVFKVDLPGLKKEEVKVEVEEDRVLQISGERNVEKEDKNDKWHRMERSSGKFMRRFRLPENAKMDQVKASMENGVLTVTVPKEEVKKPEVKSIEISG

SEQ ID NO: 9776 - protein, 753 aa, Escherichia coli CFT073
MSQHNEKNPHQHQSPLHDSSEAKPGMDSLAPEDGSHRPAAEPTPPGAQPTAPGSLKAPDTRNEKLNSLEDVRKGSENYALTTNQGVRIADDQNSLRAGSRGPTLLEDFILREKITHFDHERIPERIVHARGSAAHGYFQPYKSLSDITKADFLSDTNKITPVFVRFSTVQGGAGSADTVRDIRGFATKFYTEEGIFDLVGNNTPIFFIQDAHKFPDFVHAVKPEPHWAIPQGQSAHDTFWDYVSLQPETLHNVMWAMSDRGIPRSYRTMEGFGIHTFRLINAEGKATFVRFHWKPLAGKASLVWDEAQKLTGRDPDFHRRELWEAIEAGDFPEYELGFQLIPEEDEFKFDFDLLDPTKLIPEELVPVQRVGKMVLNRNPDNFFAENEQVAFHPGHIVPGLDFTNDPLLQGRLFSYTDTQISRLGGPNFHEIPINRPTCPYHNFQRDGMHRMGIDTNPANYEPNSINDNWPRETPPGPKRGGFESYQERVEGNKVRERSPSFGEYYSHPRLFWLSQTPFEQHHIVDGFSFELSKVVRPYIRERVVDQLAHIDLTLAQAVAKNLGIELTDDQLNITPPPDVNGLKKDPSLSLYAIPDGDVKGRVVAILLNDEVRSADLLAILKALKAKGVHAKLLYSRMGEVTADDGTVLPIAATFAGAPSLTVDAVIVPCGNIADIANNGDANYYLMEAYKHLKPIALAGDARKFKATIKVADQGEEGIAEADSADGSFMDELLTLMTAHRVWSRIPKIDKIPA

SEQ ID NO: 9777 - protein, 122 aa, Triticum aestivum
  misc_feature (38)..(38): Xaa can be any naturally occurring amino acid
  misc_feature (44)..(44): Xaa can be any naturally occurring amino acid
  misc_feature (95)..(95): Xaa can be any naturally occurring amino acid
FVEGGPCLLYWWPPPPCWGGPRPLTEGALEDSQGRLDXGFGFSXTRFPGLFGTLPGLELCNSITGRFLDEKRAVVGQLEPAAAAPAPIPDWKISXPGDNPEEVKARLKYWAQTVACTVKLCS

SEQ ID NO: 9778 - protein, 274 aa, Rhodospirillum rubrum
MHRVSANGIAIPALGFGTWQIEGDDARVAVAEALALGYRHIDTARAYGNEAQVGAGIAQSGVPRGDIFLTTKIWTSEFKPEALTAALADSLAKLGTDYVDLTLLHWPNPEVPLADSLGALAALQQEGLTLAIGVSNFPVALVEEAVAVCGRPLAVNQVEYHPFLDQSKVIEACRRHGMAVEAYSPLARGKVMEDATLRRIAEIYGRTPGQVALRWLIQQDGVIALPKAVRPEHAKANLGALDFALSQSEMAEISALARPDGRLINPSWAPAWDD

SEQ ID NO: 9779 - protein, 275 aa, Bordetella pertussis Tohama I
MAQVPVLKLNDGNAMPQLGLGVWQVPNDQAAASVKAALAAGYRSIDTAAIYGNEAGVGEGLRAAGVARKDLFVTTKLWNDRHGYDEAQRAMDESLRKLGLAYVDLFLIHWPVAGSDKFVDAWRAMVAMKEDGRARSIGVSNFTIANLRRLVDETGVVPAVNQVELHPGFAQRELRAFHAEQGIATESWSPLGQGAVMHDATLAGIAARHGKSAAQVTLRWHLQNGLIVIPKSVTPARIQANIDVFDFELSADEMADIDALPEGPRLGPDPATFTG

SEQ ID NO: 9780 - protein, 140 aa, Triticum aestivum
MVSFEMNDLKKIGLGLTGFGVFFSFLGIVFFFDKGLIAMGNILFLSGLGMTIGLKSTMQFFTKPKNYKGTISFGAGFFLVLIGWPFFGMLLEAYGFIVLFSGFWPTLAVFLQRIPILGWIFQQPFVTSFLDRYRGKRVPV

SEQ ID NO: 9781 - protein, 401 aa, Xanthomonas campestris pv. vesicatoria str. 85-10
MLSDPIIDVLTSGVAGLGVWGMLAVLLVFTQLTIFAVTLYLHRSQAHRGVDFHPAIAHFFRFWTWLTTSMITREWVAIHRKHHAKVETEEDPHSPQTKGIGQVFWRGVELYRQARAERADIEQYGKGAPSDWIERHLYTPHANAGPMALLVINSVLFGLPGIALWAIQMAWIPFWAAGVVNGLGHWWGYRNFESADTSTNLTPWALWIGGEELHNNHHAFPSSARFSMRRWELDIGWVAIRGLQALGLAKVLRVAPSLDIRPNIAVPDADTLKALLSHRFQAMTDYQRNVLKPALREEAAVTGAKLRELLPRRLRKGLVDDGRWLKPDARAQLQAWVAQRPRMRTLVEYRARLTAVLEARSHDASERLRQLQQWCHEAEASGNAALQAYAARLKGYALSGA

SEQ ID NO: 9782 - protein, 361 aa, Corynebacterium glutamicum ATCC 13032
MTSLLTPIAIRGLEIPNRMWLAPMCQYQANNLDGVPLDWHLVHYGARAVGGFGLLIAESTGISPEGRISSRCTGLWNEAQVEAWERITNFVHAQGGLIGVQLNHAGRKASTYPALPNFPTGTQSVDEGGWETFGPSGVAQPGLADPTELTREGIEKVIQDFAAAAERAVRAGFDAVEVHGAHGYLLHQFLTPVANKRTDIYGGSFENRTRLFREVAQAIRAVIPGSMPLIARISATDWIDDEPSWDDDQTVSLVSDLKKLGVDAVDISTGGAVPATIPVEPSYQVKFARRVKQEVGIPTSAVGLITHVGQAQGHLDRGDADIISLGRAALRYPSWPLFAAHELGKTRDEIPYPPSYVRGAW

SEQ ID NO: 9783 - protein, 256 aa, Alkalilimnicola ehrlichei MLHE-1
MTEIVAIPAFADNYIWLAVDRNRRLAAVVDPGDAEPVEAALRASGLRLSAILITHHHHDHTGGVEELLAAHPVPVYGPADESVPGVSQPLREPDAFEVPGLGLPLRVLDVPGHTAGHIALVADGALFSGDALFAGGCGRLFEGTPEQMYASLGKLAALPEATRVYCGHEYTLANLRFAHQVEPDNPNLTQRLRQAEAARQRGEPTVPSRMADEHATNPFLRAHLPAVRTAAERWSGQTLDEPVAVFAALRRWKDQS

SEQ ID NO: 9784 - protein, 478 aa, Leuconostoc mesenteroides subsp. mesenteroides ATCC 8293
MSKRLSEDFLWGGAVAAHQLEGAWQEGGKGVSVADIMTVGGPDKERNITKGVVSGEYYPNHEAIDFYHRYKADIALFKEMGFKCFRTSIAWTRIYPTGEESEPNEAGLKFYDDLFDELIKNNIEPVITLSHFELPYHLVTKYGGFRNRKVIDLFVKFATTCLKRYKDKVKYWMTFNEINNQANYDNDFLVFTNSGLHFNPGENREEGMYQAAHNELVASARVVKMGHDINPNFQIGCMIAMGPIYPASMNPDDVLAAQKSMEKNYFFADVHVNGQYPAFLTKYWTRKGFNIDVTQEDLADLQAGTVDYIGFSYYMSHAVKKPEGLNFDDMTPENSQVRNTYLAASDWGWQIDPKGLRYALNWFTDKYHLPLFIVENGFGAYDKVEEDGTIHDSYRIAYLQEHIREMKLAVVEDGVDLIGYTPWGCIDLVSAGTGEMDKRYGFIHVDKNNQNEGSLKRSKKDSFYWFKDVIATNAENIN

SEQ ID NO: 9785 - protein, 407 aa, Synechococcus elongatus PCC 7942
MIQPFLKRSLLWLTLLFWFATATPALALTEEQKLFNEAWRIVNQSYVDPSFNHSNWFQLREKILKKPLDNRDQTYTAIEGLLAKLDDPFTRLLRPDQYRNLQVSTAGELSGVGLQIGFEAESGDVVVIAPIEGSPAALAGLLSGDRILTVDGVAISGRDLDEAAARMRGPRGTTVALQVLRDQQTLDFELVRDRISLNPVRSQLDRDGDHPPIGYIRLSQFNANASVEVAHAIAQLDQQGAEAFVLDLRNNSGGLLTAGIEIAREWLNEGAIVYTVNRQGVLDSFAANGQALTDKPLALLVNRGTASASEILAGALQDNERAILVGDRTFGKGLIQSLFELSDGAGLAVTVAKYETPNHNDINKQGIQPDLAVEQSEPLFAEAIASAADRQYQAAVTALTEQVRHRA

SEQ ID NO: 9786 - protein, 434 aa, Arabidopsis thaliana
MRNLSFIVLFLLTLFFIHHLVDASLLVKSLPGFEGPLPFELETGYVSIGESGDVELFYYFVKSERNPENDPLMIWLTGGPGCSSICGLLFANGPLAFKGDEYNGTVPPLELTSFSWTKVANILYLEAPAGSGYSYAKTRRAFESSDTKQMHQIDQFLRSWFVKHPEFISNPFYVGGDSYSGKIVPGAVQQISLGNEKGLTPLINIQGYVLGNPVTDKNIETNYRVPFAHGMGLISDELFESLERSCGGKFFNVDPSNARCSNNLQAYDHCMSEIYSEHILLRNCKVDYVLTYRYFLSAFWANDENVRRALGVKKEVGKWNRCNSQNIPYTFEIFNAVPYHVNNSLKGFRSLIYSGDHDSMVPFSSTQAWIRALNYSIVDDWRPWMMSSNQVAGYTRTYANKMTFATIKGGGHTAEYTPDQCSLMFRRWIDGEPL

SEQ ID NO: 9787 - protein, 501 aa, Sinapis alba
MSTNKKTIVWFRRDLRIEDNPALAAAAHEGSVFPVFIWCPEEEGQFYPGRASRWWMKQSLAHLRQSLKALGSELTLIKTHSTVSAILDCVRATGATKVVFNHLYDPVSLVRDHTVKEKLVERGISVQSYNGDLCMSPGRYTVKRANLLLVLILTGKKCLDMSVESVVLPPPWRLMPLSAAETVWACSVEELGLENEAEKPSNALLTRAWSPGWSNADKILNEFIEKQLIDYAKNSKKVVGNSTSLLSPYLHFGEISVRRVFQCARMKQIIWARDKNGEGEESADLFLRGIGLRDYSRIICFNFPFTHEQSLLSHLRFFPWDADVDKFKAWRQGRTGYPLVDAGMRELWATGWMHNRIRVIVSSFAVKFLLLPWKWGMKYFWDTLLDADLECDIIGWQYISGSLPDGHELDRLDNPAIQGAKYDPEGEYIRQWLPELARLPTEWIHHPWDAPLTVLKASGVELGTNYAKPIVVIDTARELLTKAISRTREAQIMIGACGDEM

SEQ ID NO: 9788 - protein, 420 aa, Glomerella cingulata
MTTNGSDKPQVQPCRYKVGKTLGAGSYSVVKECVHIDTGRYYAAKVINKRLMAGREHMVRNEIAVLKKVSMGHQNILTLVDYFETMNNLYLVTDLALGGELFDRICRKGSYYESDAADLIRATLSAVAYLHDHGIVHRDLKPENLLFRTPEDNADLLIADFGLSRIMDEEQFHVLTTTCGTPGYMAPEIFKKIGHGKPVDVWALGVITYFLLCGYTPFDRDSDFEEMQAILNADYSFTPFDYWRGVSEHAKDFIRKCLTIDPKKRMTAHEALQHPFVAGYLNGEGEGQNLLPTVKKNFNARRTLHAAIDTVRAINKLREGQQNLMDGAKSREPDRGLKSPPNAKKDDSAISMGNTNHKDSGYGTQPEADNQNDVCHDRCGTTPTSVPASLRVRAVSRTRSLRQAKDCGAVPQCDDSLEAV

SEQ ID NO: 9789 - protein, 478 aa, uncultured bacterium 580
MKPKTNIVWLKRDLRLTDHAPLYEATCRDEQFLVLYIYEPSLINDSHTDERHWRFIQQSLSVMEKILAKQSKQLSIAYGEADQIFSEIINQHEITNVFSHEETGLKLTYERDKKLKKIFNAKKIQWHEYQTNAVIRGLNNRKTWEKQWNKVMREEIKTINLAEANIISHNFPNYSIPKFRNDLNYQPGGCLPGQKEMHDFFETRGQDYFKFISKPDRSRTSCSRLSPYIAYGNLSMREVYQTLLKSWNKTGWRRSMAALSSRLHWHCHFIQKYESEIDIEDLPINRGYKDFPYKVINCEHEDFLAWANGETGYPLIDASMRALKKTGYLNFRMRAMVVSFACHYFMIHWKLVAKHLATLFLDFEPGIHYPQIQMQAGVTGINTIRIYNPSKQLQDHDPDTKFIRDWIDELSDQDKEYILGLPDDNFDLFSNSQNFYPTPAYDFFERTKYAKNLLWQWKKSSLVKSYNSKILSRHVKVR

SEQ ID NO: 9790 - protein, 397 aa, Rickettsia akari str. Hartford
MLSKLNKPALFALIFYPIFIISLVVKYSFNYGIGRTEVIFIIASYYINNITVGIGLHRLWSHNAYKINKCAEFVLIMLSAGTLQGPALSWASNHYKHHAKTDTDQDPHSPLKFDSKVLGFLWSHIGWMLVGSGSYKSIDRITWAKHGKNNLLKWQLKYYWQIAAFMNIVVPLFIGYLVDGTIQSAYAGFVFMGLGRFLQQQATFCVNSLCHFAGSKKYYKGTAGDIWWMALFLLGENWHNYHHAFPSDYRNGAKWYHLDVHKWIIFLMSKIGLASELERTTKVRIQAKMQETLSYLSEKQKQKLTLMQAKIDHLLENLCLKIKELEESSITIKGQFKKSFVEIQESLKILAEQISSATQITEKPSEKLLKIVNKKIIDAEQSIYRLYNQFNTLKVSS

SEQ ID NO: 9791 - protein, 97 aa, Vigna unguiculata
MAALGGNRDVAGNQNSLEIDSLARFAVEEHNKKQNALLEFGRVVSAQQQVVSGTLYTITLEAKDGGQKKVYEAKVWEKPWLNFKELQEFKHVGDAPA

SEQ ID NO: 9792 - protein, 718 aa, Zea mays
PISLVRDRRLKEMLAAEGIVVQSFNSDLLYEPWEVVDDEGQPFTMFDPFWNRCLSMPYDPPAPLMPPKRINSGDLSMCPSEDLIFEDESERGSNALLARAWTPGWQNADKALTAFLNGPLADYSVNRKKADSASTSLLSPHLHFGELSVRKVFHLVRMKQLVWSNEGNHAAEESCTLFLRSIGLREYSRYLSFNHPSSHERPLLAHLRFFPWVVDESYFKIWRQGRTGYPLVDAGMRELWATGWLHDRIRVVVASFFVKVLQLPWRWGMKYFWDTLLDADLESDALGWQYITGSLPDGRELDRIDNPQFEGYKFDPHGEYVRRWIPELARLPTEWIHHPWDAPVSVLQAAGIELGSNYPLPIVELDAAKGRLQAALSEMWQLEAASRATMNNGTEEGLGDSSEVLFPQELQMEVDRQPAPAEAAANVHVHVPMPARRRGDQMVPTMTTSSLNRAGTEVSADLVVANSEEEDTRAQVPFHAHLHLHPRAEAPPAARRTNNGARQHDVFQQRRNHRRDALLAPSASEASSSWTGREGAVVPVWSPPAASGHSDAFAADEADVSSRSYLGRHPQSHRLMNWSQLSQSSTAAEDSVRPNLIELKILVAIIDQTTKVFRIFLAFFGGGVAALVHWIEKRASDVMDADLGVEGHEHAPRQALRCVHVALLCVQSDRSRRPTMGQVIAMLSSGDDGTDDLPEPSLPGYVLRPMAASGVQLCFGCR

SEQ ID NO: 9793 - protein, 832 aa, Sorghum bicolor
MLCLVSPSSSPTPLPPPRRSRSPADRAAPPGIAGGSNVRLSVLSVQCEARRSGPRKVKSKFATAAIVQEDKTMATAKGNVDHLPIYDLDPKLVKFKDHFSYRMKKFLDQKGSIEENEGSLEEFSKGYLKFGINTSEDGTVYREWAPAAQEAELIGDFNEWNGANHKMEKDKFGVWSIKIDHVKGKPAIPHNSKVKFRFLHGGVWVDRIPAWIRYATADASKFGAPYDGVHWDPPASERYTFKHPRPSKPAAPRIYEAHVGMSGEKPAVSTYREFADNVLPRIRANNYNTVQLMAVMEHSYYASFGYHVTNFFAVSSRSGTPEDLKYLVDKAHSLGLRVLMDVVHSHASNNVTDGLNGYDVGQSTQESYFHMGDRGYHKLWDSRLFNYANWEVLRFLLSNLRYWLDEFMFDGFRFDGVTSMLYHHHGINVGFTGNYQEYFSLDTDVDAVVYMMLANHLMHKLLPEATVVAEDVSGMPVLCRSVDEGGVGFDYRLAMAIPDRWIDYLKNKDDSEWSMGEIAHTLTNRRYTEKCIAYAESHDQSIVGDKTIAFLLMDKEMYTGMSDLQPASPTIDRGIALQKMIHFITMALGGDGYLNFMGNEFGHPEWIDFPREGNNWSYDKCRRQWSLVDTDHLRYKYMNAFDQAMNALDERFSFLLSSKQIVSDMNDEKKVIVFERGDLVFVFNFHPKKTYDGYKVGCDLPGKYRVALDSDAFVFGGHGRVGHDVDHFTSPEGIPGVPETNFNNRPNSFKVLSPPRTCVAYYRVDEEAERLQAKAETTGSRKTSPDIIDVDATPVKTSTATKEDKEATSGGKEDASKKGWKFARQSSNKNTK

SEQ ID NO: 9794 - protein, 243 aa, Oryza sativa
  misc_feature (208)..(208): Xaa can be any naturally occurring amino acid
  misc_feature (231)..(231): Xaa can be any naturally occurring amino acid
  misc_feature (238)..(238): Xaa can be any naturally occurring amino acid
MTDPSRYKLNHSMIRIKDPKRSLEFYQFLGMTLINKLPNPDAKFDLYFLAYDSPKAVSHGNHWTDREGIVELTHNYGTEDDPDYQITNGNAEPYKGFGHLCISVDNLQAACQRLEDAGYKFQKKLTDGRMRHIAFVLDPDGYWVEVIGQKSLEQTENVKETDISTYRMNHTMIRVKDKDISLRFYQDVMGMKLKRTSESPNAGFNLYXLGYGPDAPQSTANGVNPGADHEXLLELTWXYGTEK

SEQ ID NO: 9795 - protein, 846 aa, Arabidopsis thaliana
MASSSLSNLMLAIHEKKTSSVDLYRPLRNYVTFTYSEREAQLIDDDLETLKQLRSDIERVSDPSPAARRELLISYYKVLCLVETRFPISPDKDHVNAVSFVWYDAFKQKHKATQQNIHLEKAAVLFNLGASYSQIGLGHDRTTVDGRRQASHAFMAAAGAFAHLRDNESIKATIGPSTTVDVSVECVGMLERLMVAQAQECVFENTIAKGSTPGVSAKIARQVGIFYEEALSALIISPLKDHFDKGWISHVQLKAALFYGEACFRYGKELHEKEEIAEEIARLRSGASRLAEAKKSSRGAPAQLIEAMNTLESSIDGNLDRAVKENDRVYLMRVPSPSSLSPLPAFSMVKPMNMTDILDASKEKMFSILVPDSSAKALSRYTEMVDDVIRTQAERLQQASELTRVRLKEMDLPDSILAVDGNSALPVDLKEDVEAVQISGGPAGLEAELQQLRDLKRVNQELLVHTEELLQKEATEDSQFRSQFGTRWTRPQSSTLTKNLQDRLNRFAANLKQAGESDVKIERSVRDNSALMSILDRRPIESAVPTLARPIMSLDATEDAIVGTLKQSLRQLENLGAQRAGLEDMLKEMKRKDDILPKLMTITGSYEDMFRKEISKYDHICEDISQNIEVQEQLLMQIQAQNEEFSTIFNLEDYKASKEKCYKQIQAAIMKYREIKENINEGLKFYVTLQDAITNVKQQCSDFVMTRSIQCRDMIEDVQRQMSGLSFQDHRSSGPYPSVHQPTASSPPPPPETQNPSHPHPHAPYYRPPEQMSRPGYSIPPYGPPPPYHTPHGQAPQPYPPQAQQQPHPSWQQGSYYDPQGQQPRPPYPGQSPYQPPHQGGGYYRQ

SEQ ID NO: 9796 - protein, 369 aa, Averrhoa carambola
PDQMGLAENQLCFDLIEDWVKNNPKASICTPQGVDKFKEIANFQDYHGLPEFRQAVAKFMGRVRGNKVTFDPNRIVMSGGATGANETIIFCLADPGDAFLVPSPYYPAFNRDLGWRTRVQLIPAECDVSNGFKITRSALEAAYQKAQEANVNVKGLIITNPSNPLGTTLDRDTLKSLVSFINDKNIHLVCDEIYVATVFSSPRFISVAEVIEEMDCNRDLIHIVYSLSKDMGFPGFRVGIVYSYNDAVVSCARKMSSFGLVSAQTQYMLASMLSDEIFVEKFLAESPKRLAKRYNKFTKGFEEVGINCLNSNAGLYFWMDLRWLLKEQSNKGEIDLWRIIVNDVKLNVSPGSSSHCNEPGWFRVCFAAE

SEQ ID NO: 9797 - protein, 454 aa, Lactobacillus gasseri
MPKDFFWGNSVSSMQTEGAWNEDGKGLSVYDVRPATENTTDWHTAIDEYHRYDEDLDLMKEMNMNMYRIQISWSRVCPEGDGKFNLKGIDFYDKLINAMLKRGIEPMICLYHFDMPLHLAKEYNGFMSRHVVDAFVRFGKKMIDHFSDRVKYWIVFNEHNLYFQDEVFNISGYEKGDKTLDDMYTIFHHTMISHIRLANYIHEKYDDVKIGGMLAYQQIYPETSKATDVWAAKQAQEFLNFNIYDADTGRGYSPEVMQYAKDHHINWDITDEDQEEMKKAQADFLAFSYYSSWTLSADKIPEDIAPNRYMNYGGVKNKYLKTNAWGWTIDPLGFRNAITTMYNHYKIPVFPIENGIGLKETWDGEHMIEDDERIAYHEEHIKAMKDAMFLDGAKVLGYLGWGLIDIPSSHADVEKRYGAVYVNRSNHDLKDLKRVPKKSFYWSQKVLKNNGDEI

SEQ ID NO: 9798 - protein, 69 aa, Brassica napus
DMYDFMAVDKQATPRVDRGIALHKMIRLITMGLGGEGYLNFMGNEFGHPEWIDFPRTDQQLPDGRVIPG

SEQ ID NO: 9799 - protein, 209 aa, Ricinus communis
MATVQGGVHDSPQGTANNAEIDGIARFAVDEHNKKENAMVEFGRVLKAKEQVVAGTLHHLTIEAIEAGKKKIYEAKVWVKPWLNFKELQEFKHATDVADTTASHPSFTSSDLGVKREGHGAEWKEVAAHDPVVQDAATHAVNTIQQRSNSLFPYQLQEIVHAKAQVVDDFAKFDMILKVKRGTSEEKFKVEVHKNNEGTFLLNQMEPHT

SEQ ID NO: 9800 - protein, 873 aa, Vibrio parahaemolyticus RIMD 2210633
MTLRSKTIIGIALIEALALGVLIISGLNWFKSSNETSLEVGSQNLVSVFAQASRDAVIATDLAYLDSFARSVVSEHKLAYIRIVNQDGIELTLQGDYTGVDTNVRPFDASDGVYDVAKAITLGDQTFGVVEMGVHVEHVHQMLSFATHASLVIAFVEMSLVALFSFALGSYLMKRLDLLRTGVIKVSQQGPGSQISISGNDEVTRVGEAFNQMSRSLAQAQNKLQQEHQTQQQLSAKISQLAEVAEHARDTIIITHPDGTIAWVNSAFEQLTEYSLEEVVGKSPGELLQGEDTDANTVALLSQSVRSHSPVRVEILNYTKSQRPYWVELELSPVFDENGELLRFIAVERDITDRREMEKRLSSALDKSKKATQAKSEFLANMSHEIRTPMNAIMGISEILLENENRREPRELLLLLHKSANNLVTIINDILDYSKVEAGKLTLVEEEFDLRSLVESCTALCAYQADKKNLKLLVDMPLAMNTVVVGDKGRINQILLNLIGNAVKFTDEGHVLLKVRESELGFDFSVTDTGIGIPEDRLTHIMDKFEQVDTSATRRHEGTGLGLAISKRLISMYNGELCVRSDFGNGSCFSFSLQLPKRSQPHSEPVELNANRLLLIDDYQPRVEHLMRLAKEIGIEVTHRNDWSAAQSLGRDLDDFDRIIASVNNAQDRDALYELDATESAAKRVLFLAPCVMEEGQAWSCERDRLLPQPVTQHKLQTLLSSKIQKRRALSSQDNPDFSNLHLLVAEDSHINRILIEKMLQDTGVKLTLAEDGVEAVELYKQLSPDLVITDISMPNKDGFGVTKDIRELQENGEFPWCPIVAFSAHAMQEEQQKSIALGMNDYLTKPVQKSDLLDMIAKWGRHTQMAEKHASG

SEQ ID NO: 9801 - protein, 360 aa, Corynebacterium glutamicum ATCC 13032
MSKLFTPIQIRDITIPNRVWMSPMCTYSAATGSGLPTDFHQAHYAARAAGGVGLVMVEATGVNPVAPISPVDLGLWSHDQIEPFSRVTAAIRAGGAVPAVQLAHAGRKASTDAPWNGGGYVGPETNGWETVGPSPLAFPGLPAPRELTVSEIQEVVQQFAGAAVRADQAGFDVVEIHAAHGYLLHNFLSPISNKRTDSYGGSLENRARIVLEVIDAIRAVWPEEKPVFMRISTTDWVEENPQDDRESWTLSQSRQLALWASEHGVDLIDASSGGLDIVPIPHDRDYQTAKAADLHASTGVTVAAVGRIDDAQTAHNLVDSGDVNAVFLGRPLLKDPSWANQAALALGAEPRYVHQYDYVL

SEQ ID NO: 9802 - protein, 186 aa, Zea mays
MSVGTLPESATNRPRAPAPPEAQEEEVAIRNKQSIPPNPQSPIPNPQTLGYLGAAAMAAAGLRKGNARLPPEVNRVLYVRNLPFNISSEEMYDIFGKYGAIRQIRLGNAKDTRGTAYVVYEDIYDAKNAVDHLSGFNVANRYLIVLYYQPAKMSKKSDIKKKEDEITRLQEKYGIGSKTPGPGSSD

SEQ ID NO: 9803 - protein, 322 aa, Ustilago maydis 521
MSKVTASGIISGNISTQRIKLNNGQEIPQVALGVYKAPNDGSTENACKWAFDAGYRHIDSAARYMNEESVGRALAEWTKENNVPRSEIFITSKLWDADHDKAAAAIEDSLKKLNVDYMDMYLMHSPGTMGAEKRLEAWKALEEAVDAGKIKTIGVSNFDVEELDHLLANCRIKPAVNQIESHPFFAHEELREACISRGIHIQAYSPMAQGQALDRPEIKTIASKHGKTPAQILLKWGLTHGNIILPKSLTKHRIESNAQLFDFELDSDDMDVLDNLDEGMKVGKLGPAGTSQPASPGGTRPGSRRSSGSGGLSGNKLQMSSS

SEQ ID NO: 9804 - protein, 629 aa, Desulfovibrio desulfuricans G20
MCGIAGYCGACGVADTTEKECAGRLEALLAGIVHRGPDDAGITCAHNVAIGMRRLSIIDLAGGHQPMLSGDGRYALVFNGEIYNFRELRSELAEAGYSFATNSDSEVLLKGYMAWGRGVLDRLDGMFAFAVHDRHAGTVFLARDHLGIKPLYYIHLGGVFAFCSEPAPLLELPQVRRRLDHDALAAFLSFKYVPAPDTFIKDIKKLAAGHTLEYSPRGDMLRTERYWQLQGREGSSDAGELAERLTRAVDSQMVSDVPLGVFLSGGIDSGLLTWAAAGQGGEHFTGGYTVAFDETGRKKGLRAGGSFDESRLAALSAAHLGVPLSSTTLASPAQATLDDWIRRFQEPFANTSIPANFLLCQWVARHVKVALNGSGADELFGGYDRYYAVHPPAALRALHCAAPLLRRVADMLPVGGGKNSLVHRARRYLAGCALAPAQKHAGSIRLFTDTQLAAIAPGVVPATFVQDAFAGAPQGSLLYKATWTDMQTMLPDDYLTLVDRTSMAASLEVRVPFLARDFVQYAFSLPPAAKIAGWKKKTALRALAAKHLPEDIARQPKMGFESPVGRWFRDGLGEALCRQLAQSPLQNIISVRGVQALAQSHSAGQVDAAKPLLALYTLVRWMDMYRVEL

SEQ ID NO: 9805 - protein, 344 aa, Synechococcus elongatus PCC 7942
MAQSTTSETHTRDLDRDCTTLSRHVLEQLQSFSPEAQDLAALMQRIGLAAKLIARRLSHAGLVDDALGFTGEINVQGEAVKRMDVYANQVFISVFRQSGLVCRLASEEMEKPYYIPENCPIGRYTLLYDPLDGSANVDVDLNVGSIFAVRRQEFYDESHEAKDLLQPGDRQIAAGYVLYGASTLLVYSMGQGVHVFVLDPSLGEFVLAQSDIQLPNSGQIYSVNEGNFWQWPEGYRQYIREMHRREGYSGRYSGALVADFHRILMQGGVFLYPETVKNPTGKLRLLYEAAPMAFLAEQAGGKASDGQKPILLRQPQALHERCPLIIGSAADVDFVEACLAESVP

SEQ ID NO: 9806 - protein, 330 aa, Candida albicans SC5314
MSNNIEDDSISVDNIVDRLLEVRGSRPGKQVTLTENEIRFLCTKAREIFIQQPILLELEAPIKICGDIHGQYYDLLRLFEYGGFPPEANYLFLGDYVDRGKQSLETICLLLAYKIKYPENFFILRGNHECASINRIYGFYDECKRRFNIKLWKTFTDCFNCLPIAAIIDEKIFTMHGGLSPDLNSMEQIRRVMRPTDIPDVGLLCDLLWSDPDKDITGWSENDRGVSFTFGPDVVSRFLQKHDMDLICRAHQVVEDGYEFFSKRQLVTLFSAPNYCGEFDNAGAMMSVDESLLCSFQILKPADKKPRYAPANVANNRPGANQRKPKKAVK

SEQ ID NO: 9807 - protein, 143 aa, Glycine max
  misc_feature (97)..(97): Xaa can be any naturally occurring amino acid
  misc_feature (140)..(140): Xaa can be any naturally occurring amino acid
MGCVHFESADQRTLSVQEKLNDKTSSTVLQEHEEQGGIQEAWSEIKNRGENVGGYLAGESRHKLEKKKSQVLLEGYVEAQDDQEDLTRAKSLTDDDXLEELKGCLDLGFGFSYDEIPELCNTLPALELCYSMSQKFLDDXAKP

SEQ ID NO: 9808 - protein, 436 aa, Pseudomonas aeruginosa UCBPP-PA14
MLHCFRPTTLALALLLGAGAAQAADAPADAAPLANGSSAPLPLDELRTFAEVLDRVKAAYVEPVDDKTLLENAIKGMLSNLDPHSAYLGPEDFAELQESTSGEFGGLGIEVGSEDGFIKVVSPIDDTPAARAGIQPGDLIVQIDGKPTKGQSMTEAVDSMRGKAGSPITLTIVRDGGRPFDVELKRAIIKVKSVKSQVLEPGYAYLRITQFQVNTGEEVVKALNQLRKDNKGRLKGLVLDLRNNPGGVLQSAVEVADAFLTKGLIVYTKGRIANSELRFSADPADPSDKVPLVVLINGGSASAAEIVAGALQDQKRAILMGTDSFGKGSVQTVLPLNNDRALKLTTALYYTPNGRSIQAQGIVPDIEVGRAKVTQERSSFEGFKEADLQGHLANGNGGADRPTGKRAAPSERPQDSDYQLSQALSLLKGLSVTRGN

SEQ ID NO: 9809 - protein, 1479 aa, Burkholderia fungorum LB400
MRRALERVRLCLLAWCLIAAAQTATAAQLFDNRSNSQVVAAFPAKLTVGVLAGGWLPLDALQDGRLTGMSVDYLRALVGPNVVIEAKAFPDVSQLLAAACAGNVDLLTSVARTPERERCLSFTAPYFRSSSSAVVRRDGDSYASPALIAGARIAVEKGFALERVARERFPHAQISAFATTHAALSAVVRGDADVYLGFTPAVQYALATEEFRGLHVAFEESSRTANLRFAVPRSHAALRDQLDEALASMNPADEAAIRVRWLSGNFDAKPVPTAPRLVLTPQEQAWLRSLPPLQIGFDNGWSPFSYVDSSGRPAGIAADYLAYLSRTLGVVFNRARTADWPTAIESFQRGELAILATASIHDPRLKGARHTVAYESYPLVIVGREDEPAARSLSDFASRRVVVSSHVAGSIPLAFERIPADHVVIAPSLDDALDMVAAGEADVLVGNVAAIDILLKQRYDSVLKILGTVGESDALDFAVRTDLSPLAGLIDRALLAMPPAEKQRIRQKWVTGNSPESGLWSVTAVRLLPLLIGIGVALLITLRAYLLLQREVRLRKKTELELELQLNFQETMMKMVPYPLVAIDLDGRYIAVNEAYEQACGMSREAVIGRNTVDVQTWGEANSRILTDMTREMLNGRETAQLELQFERGAGNVRHGLFWASVCRDGDGQPACVLGTVVDITDIRRAEMRARETERRLFDVTRSLPAVVFQLRRTSDGAYSFPYIGGDTRHLLGGKDGSLNRSDHVDFQRVCEEDRAFVLAELERSALCETPVNMEFRFEGDEEIKWARAELVPRREADDSVVWSGYWVDASVEHARSDELARARDLAEAAARAKDDFFAMMSHEIRTPMNGVLGLVEVLERTPLNTDQGEMLGMIHESAGALLQILDDLLDYSKIEAGRLTIEAESIDIRELVDNAVGLLAGRAHEKGLKVRVDIAPDVAATLRGDSVRLRQILFNLLGNAIKFTPQGEVDVRVSVFAQADGVQTLEMTVEDTGIGIAPEVQNRLFEPFVQAESSTTRRFGGTGLGLTICRKLIDLMGGSLALHSEPGSGTRMTVRLDMAVETQRYSVNGLRGKRGLVATGDARVAQALMHFGEALGLTLRRVPPDAPELRDRVALANLDLLFVNEDVTLPADVRPRTRVICLTEKPKPTGYRILDDNVRLSINPISWRGLGAACAAAMTGLPSVPRSAGTPRAPEGGPPPPDRERAIASGRLILVAEDHPVNQELIRHQLALLGFACDVTNDGAEALAALQRTSYGCLITDCHMPNVSGYELTRRIREGEEGGAHRLPILGITANTAPEDLNLCRDAGMDDSLVKPTRLATLRDYLSRWFGSDSAAHAAPSESVGAPAIAATDVQGGADPFVPVDLGHMTQLWGSESTVKALLDSFVSSVREDVQSLSPLLERVGSERTELERVREWLHRVAGAASVLQYPPLLMALEDYRREINVKPPERVRNDGMVLIDKCNAMLDGIEQQAALLV

SEQ ID NO: 9810 - protein, 672 aa, Salmonella typhimurium LT2
MSYPSLFAPLDLGFTTLRNRVLMGSMHTGLEEHPDGAERLAAFYAERARHGVALIVTGGIAPVPSGVVMTGGAMLNDASQLTPHRVVTDAVHAQGGKIALQILHTGRYSYQPHLVAPSAIQAPINRFMPHELTHDEILQLIDDFAHCAQLAREAGYDGVEVMGSEGYLINEFLTRRTNHRDDEWGGDYASRMRFAVEVVRAVRQRVGNDFIIIYRLSMLDLVENGGTFDETVQLAQAIEAAGASLINTGIGWHEARIPTIATPVPRGAFSWVTRKLKGHVSVPLIATNRINDPQVAETILTRGDADMVSMARPFLADAEFLTKAQSGRADEINTCIGCNQACLDRIFIGKVTSCLVNPRACHETHMPITPAIRKKNLAVVGAGPAGLAFAINAASRGHHVTLFDAQSEIGGQFTIARQIPGKEEFYETLRYYRRMIDVTGVTLKLNQRVNAEDLQPFDEAILACGIVPRRPPIDGIDHPKALTYLEVLRDKAPVGKRVAIIGCGGIGFDTAMYLSQHGESTSQNIAEFCTEWGIDTSLQQAGGLRPEGPRLARSPRQIVMLQRKTSKPGEGLGKTTGWIHRATLLARGVKMIPAVSYQKIDDDGLHLLIGGEPQLLEVDHVVICAGQEPRRELADPLRAAGKTVHLIGGCDVAMELDARRAIAQGTRLALEI

SEQ ID NO: 9811 - protein, 564 aa, Triticum aestivum
MALLAAATLNPTTHLSLRSRAGRNSENLWLRSAASSQKSKGRFCNLTVRAGTPSKPAEPIGPVFTKLKPWQIPKRDWFDKDFLFGASTSAYQIEGAWNEDGKGPSTWDHFCHKYPERISDGTNGDVAADSYHLYEEDVKALKDMGMKVYRFSISWSRILPNGTGEVNQAGIDYYNKLINSLISHDIVPYVTIWHWDTPQALEDKYGGFLDLQIVDDYKQFAKVCFESFGDRVKNWSTFNEPHTYCCFSYGEGIHAPGRCSPGMDCAVPEGDSLREPYTAGHHILLAHAEAVEMFRTHYNMHGDSKIGMAFDVMGYEPYQDSFLDDQARERSIDYNLGWFLEPVVRGDYPFSMRSLIGDRLPVFTKEEQEKLASSCDIMGLNYYTSRFSKHVDISPDVTPKLNTDDAYASSETTGSDGNDIGPITGTYWIYMYPKGLTDLLLIMKEKYGNPPIFITENGIADVDGDETMPDPLDDWKRLDYLQRHISAVKDAIDQGADVRGHFTWGLIDNFEWGSGYSSRFGLVYIDKNDGFKRKLKKSAKWFAKFNAVPKHLLGYYQANWATPV

SEQ ID NO: 9812 - protein, 366 aa, Populus tremula x Populus tremuloides
QMGLAENQLCFDLIQDWLKKNPKASICSPEGLNEFREIAIFQDYHGLPEFRSAVANFMEKVRGNRVTFDPDRIVMSGGATGAHETVAFCLADPGEAFLVPAPYYPGFDRDLRWRTGVKLIPVDSDSSNSFMVTREALENAYEKAQLDNIKVKGLLITNPSNPLGTILDRETLRSIVRFINEKNIHLVCDEIYAATVFSQPDFISVAEILQEDIECNLDLVHIVYSLSKDMGFPGLRVGIIYSYNDAVVSCARKMSSFGLVSTQTQYLIASMLSDNEFVEMFIRESKSRLAARYRVFTRGLDQVGIECLKTSNAGLFLWMDLSRLLKEQTFKAEMGLWRVIIHEVKLNVSPGCSFHCSKPGWFRVCF

SEQ ID NO: 9813 - protein, 581 aa, Oryza sativa (japonica cultivar-group)
MYRAAAAAASSISRSSSALRKQLSRGGCGEQRLWARGYAAKEVAFGVGARAALLQGVNDLADAVKVTMGPKGRNVIIERSHRAPKVTKDGVTVAKSIEFEDSAKNVGANLVKQVAEATNKVAGDGTTCATVLTQAILTEGCKAVAAGVNVMDLRNGINKAISSITTHLKSKAWIINSSEEINQVATISANGEKEIGDLISKAMEKVGKDGVITITDGKTLDNELEAVQGMKLSRGYISPYFVTDQKTQKCEMENPLILIHDKKISTMNSLLPVLEMSIKNRRPLLIIAEDVEGEALSMLVLNKHRAGLKICAVKAPGFGENRRANLDDVAVLTGGEVVSEDQGLDLGKVELQMLGTAKKVTVSLDDTIILDGGGDKQQIEERCQQLRESMDKSTAVFDKEKAQERLSKLSGGVAVLKIGGASEVEVGEKKDRVTDALHAARAAVEEGIVPGGGVALLYATKELDKIITANEDEKIGVQIIKNALKAPLMTIAANAGIDGGVVIGKLIEQDNLNMGYDAARGEYVDMIKAGIIDPVKVIRTALQDASSVSLLMTTTEAAVAEPPAAKARMASRMPQMSGMDF

SEQ ID NO: 9814 - protein, 413 aa, Triticum aestivum
MSVSSSSMCGGDAGMKCVVWFRRDLRVEDNPALAAAARTAGEVVPAYVWSPEEDGPYFPGRVSRWWLSQSLKHLEASLHRLGAAKLVTRRSPDSVAALLQLVRDTGATHLFFNHLYDPISLVRDHRLKEMMTAEGIVVQSFNADLLYDPWEVNDDKGQPFNMFMPFWNRCLSMPYDPPAPLLPPKRINSGDLSMCPSDDLIFEDESERGSNALLARAWSPGWQNADKALSAFLNGPLIDYSVNRKKADSANTSLLSPYLHFGELSVRKVFHLVRMKQLVWSNEGNHAAEESCTLFLRSVGLREYSRYLCFNHPCSHEKPLLAHLRFFPWVVDESTFKFWRQGRTGYPLVDAGMRELWATGWLHDRIRVVVSSFFVKVLQLPWRWGMKYFWDTLLDADLESDALGWQYLGRDHA

SEQ ID NO: 9815 - protein, 365 aa, Populus tremula x Populus tremuloides
QMGLAENQLSVDSIIDWIEKHPEASICNPEGVHMFKDIANFQDYHGLPEFRQAIAKFMGRVRGGRVAFDPDRIVMSGGATGANELIMFCLADPGDAFLVPSPYYPAFYRDLGWRTGVQIVPVDCDSSNNFQITKGALEAAYDKAQQNGINVKGLIITNPSNPLGTTLDRETLKSLLSFINEKNIHIVCDEIYAATIFGSENFVSISEVVEEVMDCNRDLIHIVYSLSKDMGLPGFRVGIVYSYNDAVVNCGRKMSSFGLVSSQTQYLLASMLSDEEFVEDFLAGSSKRLKKRHGVFTKGLEQIGISCLESKAGLFVWMNLRHLLKEQTNDGEMALWRVIVNDVKLNVSPGSSFHCVEPGWFSVSS

SEQ ID NO: 9816 - protein, 127 aa, Brassica napus
MAGMVFGLEAPMMTALQHLLDIPDGEAGAPAGEKQGPTRAYVRDARAMAATPADVKELPGAYAFVVDMPGLGSGDIQVQVEDERVLVISGERRREEKEDAKYLPMERRMGKLMRKFVLPGNADMEKI

SEQ ID NO: 9817 - protein, 480 aa, Listeria monocytogenes str. 4b F2365
MKELLTFPKNFWWGSAWSAEQAEGRGDTGKAKTVWEHWFETEPNRFYEGVGSEITTDHFNRYKEDVQWMKKTGQNSFRISISWARMFPNDGVGEVNPKAIAFYRDLLTEMNENGIKPFANLYHFDMPVALQDAGGWESREVVDAYVHFADTCFKEFGDLVYHWFTFNEPLGPILGGYLEDFHYPNQIDFKRGAQAGFNTILAHALAIKAFKKLNLSSKIGVILNLSPTYPRSQNEYDLEAAEICDAFYTRSFLDPMVKGTFPEKLVEIMREYDQMPEYTEEDLTIIKENTAQILGLNYYEPRRVKARLTAINEKSPFLPDWFFEPHNMPGKRMNIYRGWEIYERGIYDLCIDIRDNYGNIESFISENGMGVANEERFLNEEGQIQDDYRIQFVKDHLAYVHQAIAEGCDIKGYHLWTFIDCWSWINAYKNRYGLVSLDVETGKRTMKKSGEFYKKMSDMNGFEYDTSKLVGTKREETTNG

SEQ ID NO: 9818 - protein, 299 aa, Arabidopsis thaliana
MSETTKDDGSSQKKSVRKEKRAYVLRKWTQFDVGRASTVGTVHLLCLLAPFNYKWEAFRFGIILAILTNLCITFSYHRNLTHRSFKLPKWLEYPFAYSALLALQGDPLDWVSIHRFHHQFTDSDRDPHSPIEGFWFSHVLWIFDTDYIREKCGRRNNVMDLKQQWFYRFLKKTLVLHILAFWTLIYLWGGLPYLTWTVGFGGVIGYHGTWLVNSACHICGSQAWQTNDTSRNVWWLALLTMGESWHNNHHAFETSARHGLEWYQLDITWYLIWFFQALGLATNVKLPTDAQKRKMAIRR

SEQ ID NO: 9819 - protein, 168 aa, Triticum aestivum
GRIEKWVLRNAFDDEEKPYLPKHILYRQKEQFSDGVGYSWIDGLKDHAKAHVSDSMMTNASFVYPDNTPTTKEAYYYRTVFEKFYPKNAARLTVPGGPSIACSTAKAVEWDAAWSELLDPSGRAALGVHDAAYEEKAPASVDPVVDNVSRSPAHDVKRLKTAISAAAV

SEQ ID NO: 9820 - protein, 323 aa, Allochromatium vinosum
MDPIRTSRLRAPLLASALLLAGSSVCAAEPDLETELRLNAMIGDTETAAELLDQGAHVDAPNQFGKTALMFAVEGDDLETVALLLSRGADVNARTVAGCTPLTFAAEAGHIGISALLLERGAHVHDRTRSGWDALMIASRHGITDMVEQLLFKGADPKAADREGRTALMQAASKGETGVLPLLIEGGADLEARDKQGATALLIAADQGQAGAVETLAGLGAQLDAVDALGSTALILAVGHGHVAMVERLLAMGADPNRQDRKGTTALMEAVATDHAELIDRLIAAGARTDLKDDADRTAADIAVQLGHRQAIARLAPKASKTP

SEQ ID NO: 9821 - protein, 435 aa, Arabidopsis thaliana
MGSWIPKLLLLQLVLLLTKHADSSSIIKYLPGFEGPLPFELETGYIGVGEEDEDQMFYYFIKSESNPKTDPLLLWLSGGPGCSSFTGLIYENGPLGFKVEAYNGSIPTLVSTTYSWTKVANIIYLDQPVGTGFSYSRNPLADIPSDTGSAKRVDEFLRKWLTKHPEYFSNPFYAGGNSYSGKMVPVIVQEISNGNCIYGKPQIRLQGYVLGSPVTDYDLDRNSRIQFAHGMALISNELYESMKRTCGGNYIFVDPLNTECLELIKDYDNCVSGIYENLILVPKCDLTSPDCHSYRSMLSDYWANNESVRRALKVVEGTTGRWERCKWTLQNNKDIKSSIPYHKKNSIQGYRSLIFSGDHDMLTPYVGTQDWIRSLNYSIIDKWRPWMILDQVAGYTTTYANKMTFATVKGGGHTLDYKPDENSILFKRWISGQLL

SEQ ID NO: 9822 - protein, 224 aa, Glycine max
MGSEGPPAAVATVHVTGFRKFHGVSENPTETIVNNLNEYLNKKKGLPKGLVIGSCSILETAGQGALIPLYQTLKSAITSKESESSSSNKIIWLHFGVNSAATRFAIERQAVNEATFRCPDEMGWKPQKVPIVPSDGAITRIRETTLLPVEEITKALANKGYDVMTSDDAGRFVCNYVYYHSLRFAEQNGTKSLFVHVPLFSTINEETQMQFAASLLEVLASTCQ

SEQ ID NO: 9823 - protein, 172 aa, Triticum aestivum
SQYYVLIRLGRSGFKKIMSNLTATADHLADRLKATGRFEIMSEGQGRGLPLVAFRLKDEHHYNEFDISSKLREGGWIVPAYTMAPNVEHIKMLRVVVREDFSRSRCEILVKDIIAALRALDTSDKEAVAKRREHIEEHSHSSIYSNDVNPKSKTTGTESESTEDSKTAQGIC

SEQ ID NO: 9824 - protein, 130 aa, Oryza sativa
MAAVSLRKSNARLPPEVNRVLYVRNLPFNISSEEMYDIFGKYGAIRQIRLGNAKDTRGTAFVVYEDIYDAKNAVDHLSGFNVANRYLIVLYYQPAKMSKKSDVKKKEEEITRLQEKYGLGSKTPSSAPDA

SEQ ID NO: 9825 - protein, 413 aa, Bifidobacterium longum DJO10A
MDISAPNPIAAAEAAAKANGIALSKLNDSNPTRHGLAPELVPSVYTADPRGPRAARESLAAFLNTANVVDASSPQLASPAAGEGRNERHAAFTNVNTAIEGADPDALYLLSSTSEAYSWLIKLLCDAGDAVLAPKPGYPLIESIARLECVDTVEYQLQFDGSWFIDIAELERLLSEPGGERVRALVLINPNNPTGSYVKPTERARIVTLCREHGIALIADEVFFDYSLEPFPGDARLAGERGVLTFALDGFSKMLAAPHAKVGWIQVSGPAEDVAEAQRRLDVIADDYLPMGDIIAERIPALLNAAPAQTRRVGERVRNNLAKLHELLDADPNGLVSVLRAEGGWNVLLRVPSVIDENELVLRLIDEHQLTGQPGYFFDMTSNGYLAVSLLPEPDEFERGIRAVLNTVAALLR

SEQ ID NO: 9826 - protein, 409 aa, Magnaporthe grisea 70-15
MGSAGPANPKLFEPLAIANGKHVLKHRVVHAPLTRNRGTPVNKNDSREEPNRLWLANDVIKEYYTQRATDGGLIISEGLPPSLEGGAMPGVPAIHQAAQVESWKPVTEAVHAKGSIFYAQLWHSGRAMIPQHIGGPVPAPSAVPWDDPTEVFWYPPAHTTELCKYVDYPPIEMTVEHIKRTIDDYVKAAKNALEAGFDGIEVHGGNGYLPEQFLSSNSNQRTDDYGGSPEKRCRFVLELVEALAAAIGQENLAIRLSPFGLFNQARGTQRKETWGYLCRELKARLPNLSYVSFIEPRYEQLFSEEDKQKFLDDWGMSNVDLSMFREIFAGTPFFSAGGFDAKTGKEAVEKGTYDAIVYGRYFTSNPDLVRRVKEDLPFNPYNRERFYGPFEDPTIGYTDFATYDEQQKK

SEQ ID NO: 9827 - protein, 299 aa, Arabidopsis thaliana
MCDPIREDGSNKRGAVSKEKRPYIHREWSWADIIRALTVINVHFLCLLAPFNYKWEALRFGFVLYALTSLSITFSYHRNLAHRSFKLPKWLEYPLAYFAVFALQGDPLDWVSIHRFHHQFTDSDRDPHSPIEGFWFSHVWWICDTRYIKYKCGGRNNVMDLKQQWFYWFLRMTIGFHVLMFWTVLYLYGGLPYLTCGGGVGGVIGYHVTWLVNSACHIWGSRSWKTKDTSRNVWWLSLFTMGESWHNNHHAFESSARQGLEWWQIDITWYLIRLFEVLGLATDVKLPSEIQKQKLALTR

SEQ ID NO: 9828 - protein, 466 aa, Bacillus subtilis
MKRQLKLFFIVLITAVVASALTLFITGNSSILGQKSASTGDSKFDKLNKAYEQIKSDYYQKTDDDKLVDGAIKGMIQSLDDPYSTYMDQEQAKSFDETISASFEGIGAQVEEKDGEILIVSPIKGSPAEKAGIKPRDQIIKVNGKSVKGMNVNEAVALIRGKKGTKVKLELNRAGVGNIDLSIKRDTIPVETVYSEMKDNNIGEIQITSFSETTAKELTDAIDSLEKKGAKGYILDLRGNPGGLMEQAITMSNLFIDKGKNIMQVEYKNGSKEVMKAEKERKVTKPTVVLVNDGTASRSRNYGRCLHESSNVPLIGETTFGKGTVQTAKEYDDGSTVKLTVAKWLTADGEWIHKKGIKPQVKAELPDYAKLPYLDADKTYKSGDTGTNVKVAQKMLKALGYKVKVNSMYDQDFVSVVKQFQKKEKLNETGILTGDTTTKLMIELQKKLSDNDTQMEKAIETLKKEM

SEQ ID NO: 9829 - protein, 436 aa, Oryza sativa (japonica cultivar-group)
MGFVESIGRYRVGRTIGAGTFAKVRLAVDADTGATVAVKVIDKRMVIRNNLMYQVKREITAMKLLNHPNIVKIYEVIATKTKICLVMEYVSGGQLSDKLSYLKRLDEKEAKKYFYQLIDAVDYCHRRGVYHRDLKPENLLVDNQGNLKVSDFGLSVLKKPGQFLSTSCGSPCYVAPEVIQHKSYDGAAADVWSCGVILFELLAGYLPFQDCSLTNLYRRISRAQFVFPQWLSVPQKKIIIRILDPSPITRAKISDIFDDKWLQDHCNPSARIENDDDCDVIEEASTDSDSSHNTEVKETEEMTAETDRFINAFQLIARCSDLDLSGLFQEQKTKLASPHPVQETFDKIKVAAKDVSMAVKRMNSSLVEIQDSKLLPRSNLDLTLSAEVIKVTPAHCVVEVSKSTGDLRSYKEFCRSLSSLLNGGQLSASSSDMECD

SEQ ID NO: 9830 - protein, 273 aa, Lactobacillus johnsonii NCC 533
MKHLTLNNGVKIPIFGFGTYEISPDQTKEAVLSAFKDGYRLIDTAQYYQNEQQVGEAVRASNLNRDEVFITTKTMTDGYEATKQGLDESLNKSGLDYFDLVLIHWPMGHDLDTWRALEEAYKAGKTRAIGISNFNSRQTLELINHAEIRPMVDQIETHLLLQQWKMHEFLKKENIIHESYSPLGNGQQNLMTNPVLQKIGEKYGKSPIQVILRYLVQNDIVTIPRSTNPAHIKANIDIFDFELDKEDLKQLCALDERKPIDGWPAEMREDEDY

SEQ ID NO: 9831 - protein, 221 aa, Ginkgo biloba
MGRGKIEMKRIENTTNRQVTFCKRRNGLLKKAYELSVLCDAEVALIVFSSRGRLYEFANNSVKRTIDRYKKTCADNSHGGAISECNSQYWQQEAGKLRQQIDILQNANRHLMGDALTSLSVKELKQLEIRLERGISRVRSKKNEMLLEEIEIMQRREHILLAENQFLRTKIAECESSQNANMLPGPEFDALPGFDSRHFLHASIMDAHHYAQQDQTALQLG

SEQ ID NO: 9832 - protein, 706 aa, Mycobacterium avium
MATDHTSDAPDPKQRDLESARFRRDTGYLTTQQGVRVDHTDDALTVGERGPTLLEDFHAREKITHFDHERIPERVVHARGAGAYGYFEPYDDRLAQYTAAKFLTSPGTRTPVFVRFSTVAGSRGSADTVRDVRGFATKFYTEQGNYDLVGNNFPVFFIQDGIKFPVLVHAVKPEPHNEIPQAQSAHDTLWDFVSLQPETLHAIMWLMSDRALPRSYRMMQGFGVHTFRLVNARGRGTFVKFHWKPRLGVHSLIWDECQKIAGKDPDYNRRDLWEAIESGQYPEWELGVQLVAEDDEFSFDFDLLDATKIIPEEQVPVLPVGKMVLNRNPDNFFAETEQVAFHTANVVPGIDFTNDPLLQFRNFSYLDTQLIRLGGPNFAQLPVNRPVAQVRTNQHDGYAQHAIPQGRSSYFKNSIGGGCPALADEDVFRHYTQRVDGQTIGKRAEAFQNHYGQARMFFKSMSPVEAEHIVAAFAFELGKVEMPEIRSAVVAQLARVDDQLAAQVAAKLGLPEPPEEQVDESAPVSPALSQVTDGGDTIASRRIAVLAADGVDVVGTQRFTELMEQRGAVVEVLAPVAGGTLAGGSGGELRVDRSFTTMASVLYDAVVVACGPRSVSTLSDDGYAVHFVTEAYKHLKPIGAYGAGVDLLRKAGIDNRLAEDTDVLNDQAVVTTKAAADELPERFAEEFAAALAQHRCWQRRTDAVPA

SEQ ID NO: 9833 - protein, 159 aa, Glycine max
MRVAATRPASSAPVALLAALALLFLVGSASLAIGAMASHVLGGKSENPAAANSLETDGLARFAVDEHNKRENALLEFVRVVEAKEQTVAGTLHHLTLEALEAGRKKVYEAKVWVKPWLDFKELQEFRHTGDATSFHHLRTSAPREGEHDPGMAGCGPVQ

SEQ ID NO: 9834 - protein, 705 aa, Cytophaga hutchinsonii
MIGFILSRIQLIVLLLLTFVAIPASAQTSKTEQPSCSKKTDALWVLLTKKHIAPIQFNHTVSVEIADLLLTELDYKKIHFYESDRQNLLIQIQNLKPSSAKDLCTLIAGISELYQTRIKESQAILQTLAANELNFSENEIVTFSSSKRQFMESKEKKISRWKRNIKFLVLNNLYYAVDSAHSTDVAAPSNFLADKNKITRTIIDKELKKINALADPSTDFTATVENALLNAICKRFDPHTEYYNYTAFKEFSEHLQSKVLTFGVFFGETAFGNLSIRYVAPGSTAWFSNVIQENDVVLWFKLNQQVFDVSALTHTEANALLQNEKYSLLEIGLKKDNGSSETIKLKREAIKFENNTVKSYIIKDAKKIGYISIPSFYSDDSNPNALGAANELSKEILKLKNENIEGLIIDLRNNGGGSLYEAVGMSGLFIDIGPLFYVLERSGKATLTKDMNRGTVYDGPLCIMVNGYSASASEIFSAAMQDNHRALIVGEQTYGKATGQSISQLDTTKSISTFSATDNMGATKITEIKLYRTSGFSYQGKGVTPDIILPYLDVLSEKENTEPFYLKGDSIAKKAVFAFPEALPVASLNEMNNIRIKENPQYKQLKHVSDSLHTTQDDDIIIHLTAAGFWKDMRILKAENEKESAAGSFVRPGFEVYYNRLESDFLSYDANYKKLYTGYLDELKTDLILQQTHDIMCDFIKLKQK

SEQ ID NO: 9835 - protein, 612 aa, Arabidopsis thaliana
MKMDKKTIVWFRRDLRIEDNPALAAAAHEGSVFPVFIWCPEEEGQFYPGRASRWWMKQSLAHLSQSLKALGSDLTLIQTHNTISAILDCIRVTGPTKVVFNHLYDPVSLVRDHTVKEKLVERGISVQSYNGDLLYEPWEIYCEKGKPFTSFNSYWKKCLDMSIESVMLPPPWRLMPITAAAEAIWACSIEELGLENEAEKPSNALLTRAWSPGWSNADKLLNEFIEKQLIDYAKNSKKVVGNSTSLLSPYLHFGEISVRHVFQCARMKQIIWARDKNSEGEESADLFLRGIGLREYSRYICFNFPFTHEQSLLSHLRFFPWDADVDKFKAWRQGRTGYPLVDAGMRELWATGWMHNRIRVIVSSFAVKFLLLPWKWGMKYFWDTLLDADLECDILGWQYISGSIPDGHELDRLDNPALQGAKYDPEGEYIRQWLPELARLPTEWIHHPWDAPLTVLKASGVELGTNYAKPIVDIDTARELLAKAISRTREAQIMIGAAPDEIVADSFEALGANTIKEPGLCPSVSSNDQQVPSVVRYNGSKRVKPEEEEERDMKKSRGFDERELFSTAESSSSSSVFFVSQSCSLASEGKNLEGIQDSSDQITTSLGKNGCK

SEQ ID NO: 9836 - protein, 547 aa, Haemophilus somnus 2336
MTAKDVKFGNDARVKMLAGVNVLADAVKVTLGPKGRNVILDKAFGAPTITKDGVSVAREIELEDKFENMGAQMVKEVASKANDAAGDGTTTATVLAQAIVSEGLKAVAAGMNPMDLKRGIDKAVNAVVEELKILSKPCETSKEIEQVGTISANADETVGKLIAQAMEKVGKEGVITVEDGSGLSDELDVVEGMQFDRGYLSPYFINKPEAATVELDNPFILLVDKKISNIRELLPVLEGVAKAGKPLLIIAEDVEGEALATLVVNTMRGIVKVAAVKAPGFGDRRKAMLQDIAILTAGTVISEEIGMELEKATLEDLGQAKRVVINKDNTTIIDGIGDEAQIKGRVAQIRQQIEEATSDYDKEKLQERVAKLAGGVAVIKVGAATEVEMKEKKDRVDDALHATRAAVEEGIVAGGGVALIRAATKVATTLKGDNEDQDVGIKLALRAMEAPLRQIVTNAGEEASVVASAVKNGEGNFGYNAGTEQYGDMIAMGILDPTKVTRSALQFAASIAGLMVTTECMVADLPKEEKADLTGGMGGMGGMGGMM

SEQ ID NO: 9837 - protein, 649 aa, Rhodococcus erythropolis
MTPYPRLFAPLRLGNLTLRNRVVFSAHLTNYAENGLPTEQHASYYEARARGGAGLIITEEHSTHPSDRPYEKMIAGYRPEAIEGYRRITDAVHAHGSSILAQINHNGGQGAGTYSRSPLLAPSAVADPLFREVPKAVDDADIAEILAGFALVARNCVAGGFDGVELQASQSSIVRAFLAPSTNLRTDRYGGGVANRARFLLEVLGVLRKAIGPDRVLGVRLSGYEGTRGGIELSDAVTTAQLIEADGHVDYINTTVGMATETLHLVEASMAVPTGYANFVPSAIREVIDLPVVGVGRFKTPEQAEAALEDGVCDLVGVVRGQIADPDFVNKARAGQSSQVRTCLSCNQECVGRMGLGRWLGCTENPRAGRESVPLPMPRRRGRTVVVVGGGPAGLQAAATAAQRGHAVTLFERERRLGGQILTASVVSVRRELADLVRNLESECRRSGVTIELGVGADLAIVEERAPDVVVIATGARPVRPTWAGGSERVVSVRDVLDGRVLPSGMVLVYDELGFHQGTSVAEFLADRGCAVTIATNGMVVAQDLSVTLDFEGWNRRAFEKSIVQRTDLMATSVSAGASPLVSLVHLPTGVVEEVAVDWVVFATQQEPVDELWNTLQGSSFEIFRIGDALSPRRSHAAVIEGHRAALAI

SEQ ID NO: 9838 - protein, 142 aa, Streptococcus thermophilus
MLNKIQHRNLNTYSVTPFDFFEEFSRNLFNDFKPNFIKTDIHETDNEYLVEAELPGIPKENIQVTYENGVLTISGQRQIDAVNEDKKGKLIRSERSLTSVQRQYLLENVKEDEIKASYSDGVLKVTLPKDSNKEIKKSISIE

SEQ ID NO: 9839 - protein, 668 aa, Porphyromonas gingivalis W83
MRIIEQDPWLRPYESVIESRLKYARKRETDLTGGRSGGLSDFANGHLYYGLHQDGDSWVIREFAPEATAVYLIGELSRWRRLPQFRFAPVDEAGSWELRLSCRLLPHGSRYRLFFEWPGGEGERIPAWCNRVEQDPETYLFYAQVWVPDTPYEMKHPHPNRKDEPLLIYECHIGMSSEEEKVSTYEEFRRNILPRICKDGYNAIQLMAIQEHPYYASFGYHVSSFFAPSSRFGTPEDLKRLIDEAHALGLYVIMDLVHSHAVKNEVEGLGLYDGTHTLFFHDGNRGLHPAWDSYCFDYGRDNVLHFLLSNCKYWLTEFGFDGFRFDGVTSMLYYSHGLGDRFDNYDSYYNGHQDGDAIAYLILANKLIHELCPDAITIAEEVSGMPGLALPLADGGYGFDYRLAMNIPDFWIKLIKEHRDEDWNPGDIWYQLTNRRQEEKTISYAESHDQALVGDKTIIFRLIDADMYWYMNKQSCVHSVDRGIALLKMIRLFTATTMNGGYLNFMGNEFGHPEWIDFPREGNGWSYKYARRQWSLADSPFLRYAGLHLFDQDMIAMIRSVESFHKLPLREYWLKREEQVICYGRGDFFFVFNFHPERSYSDYPIPLPAGKYSVAMSTDARKYEGFGRVDEWVEHFTLPDGSKDRFTHEQYLNLYLPARSALVLKLAE

SEQ ID NO: 9840 - protein, 653 aa, Oryza sativa
MPYNESERLDILKRYSNMLEALPGYAFDDATSLVSYICGVPIAYIAFIDENRQWFKSEIGLGFSIVPREITFSRYTIMDSSLVEIQDTLLNERFKDDPDVKGGLKIRFYAGMPLITPDGHAVGVLCAADHEPRSLNENQKRALHIVARHVITTLELGIKNNELLRQKKIAESAVLAKESFLANMSHEIRTPLNAIIGFTELLSGTPLDKQQQAFIQDVQTAGENLLLIVNDILDLSKIESGGLSLEKQPFNLKKSLRHVYDLLKVKTADGVEFNLYLDAELPDVITGDQGRLNQIMVNLAGNALKFTNEGEVTISVKNKGETEDSYTIRFSVKDTGIGIPKEHLESIFERFTQGQEDTTRKFGGTGLGLSIVKELVKLHDSKIQVKSREGAGSEFFFTTTYKKPANVKENPKLLPVNDLGRLKILLLEDNRLNQKLAQNVIEGFGFEIDIAENGDQGIKLLSENQYDLVLMDLQMPARDGYQTTHYIRSELKNEIPIIAMTAHSLADEHHRCLNAGMDGYVPKPFKQHELLEAIKQALKKDRRPLIPSKADLSAIEKTDRIKPGWKKEVTSQFIQKAPVELKELQQAVYRKDFRSVLQTAEQLQVWLHLFLLENLSQTLTSIEDQARKKEFTAETADNLDILHSNIEEIIKEL

SEQ ID NO: 9841 - protein, 738 aa, Burkholderia fungorum LB400
MSSQVNYSTRIAEGTPFPLGATWNGSGVNFALFSAHATKVELCLFDETGENEIERIELPEYTDEVWHVFVPNLKPGAVYGYRVHGPYEPEKGHRFNPNKLLLDPYAKAHIGELKWAPEIFGYTLDSEEGDLSFDERDSAPFVPKCKVVDANFSWSHPERNALPWERVIFYEAHVRGFTKRHPEVPENLRGTFAGLGQQVVLDYIKNLGVTSVELMPIQTFVNDSYLLDKGLTNYWGYNTIGFFAADPRFFASSIDSVGEFKEMVDRFHNANLEVILDVVYNHTAEGNERGPTISFKGIDNASYYRLMPDEPRYYINDTGTGNTLNLSHPRVLQMVTDSLRYWVTEMKVDGFRFDLATILGRELHGFDEGGGFLDSCRQDPVLSSVRLVAEPWDCGPGGYQVGGFPPGWAEWNDRFRDTVREYWKGDEGKVPDLATRLTGSGDKFNHRGRRPWASVNFIAAHDGFTLNDLVSYNDKHNEANGEDNKDGHSDNKSWNMGVEGPTDDPDIRQQRERQKRNLLATLLLSQGTPMILAGDEFGRTQKGNNNAYCQDNEISWVDWEAIDDDGRALIEFVRNLTTLRHRLPVLRRGRFLTGEYNEALDVTDARWISPDGKDLSQEQWDDASMRCFGLVIDGRAQASGIRRPASDATLLLVLNAHHDVVNFTLPDIPEGQRWTCLLDTNMPVRSELPHFAAGDAYQVTARSLLLLALEAPSRATQRVFDRLEEQLTTEDSEPPAQA

SEQ ID NO: 9842 - protein, 766 aa, Debaryomyces hansenii CBS767
MNTNLLYIPYRETDIIDLGNELRNIIKMEYFQPSSNFDRDLQAVRNLRNNISNLKNEQVNNNDETVCVQYYHQLSNVIKKFPDECVEFSWYGTLGYGRSGPTRSRSLRIEQLNILYQLGSYFSQAALMESRYSDEGLKKSCSYLQAAAGCFNSMILQIQKENEKETGMIRIPRDLQPETLQFLKSLMIAQAQETIWQKSLASGMKDSVIARLSIQTSEYYSTAAKYGNSSEFIKLEWINHVTVKQFHFKAAAHYRVSILNHEGFKYGEQVASLQVALSSCDSAFRKKKYVNDFVIEDLQGLTETIKSTLRVAEKDNDLVYLKPVPKENDLAPIPGASLVKPILPPAIESFDDSSVLFKELLPYLIVQVGQAYRERQDSFIRDLFIDPIQSLNKIMYKFITERNLPASIDTIQKPENLPESIIQHSQEIISYGGTKLIEDSLNEIAKLTLESRHILEGCQERLKIEADEDDIMRERQGSQRWARPKSSEASSEFINKINKMEQYLDQAKEGDQFIISQYHEIEPYLQLYCGGYKELIQFIPNSTYVKLDTKINEIIIKLRELINEVSRIENQRKQFLTRIEIKARNNNILPSIIDSFKKKQRKLYEENAAIDERSFEDVYAKHITMFNSDLRFLEDLKHAQIALEGNIDDLNQEFESEYQHTNNESQYKRQEVLQTLENVYTKYLELISNLNEGSKFYSDFIIKSNSVLKECDEYVYHRRVEGRELEMFLNNQAVPVESVGSQQLAPDFPPQPMGGTWNPNNGIKFG

SEQ ID NO: 9843 - protein, 911 aa, Arabidopsis thaliana
MEDYGFEYSDEEQEEQDVDIENQYYNSKGMVETEPEEALSGFAEVVQMEPEKADWGFKALKQTVKIYYRLGKYKEMMEAYTEMLTYIKSAVTRNYSEKCINNIMDFVSGSASQNTGLLQEFYQTTLKALEEAKNERLWFKTNLKLCNIWFDIGEYRRMTKILKELHKSCQKEDGTDDQKKGSQLLEVYAIEIQIYTETKDNKKLKQLYHKALAIKSAIPHPRIMGIIRECGGKMHMAERQWEEAATDFFEAFKNYDEAGNQRRIQCLKYLVLANMLMESEVNPFDGQEAKPYKNDPEILAMTNLIAAYQRNEIIEFERILKSNRRTIMDDPFIRNYMEDLLKKVRTQVLLKLIKPYTKIGIPFISKELNVPETDVTELLVSLILDSRIDGHIDEMNRYLLRGDSGNGRKLHKAVDKWNSQLKSLSSNITSRQLDSNCKRWVICTGTLTNNVDVFFEEMNRRQQVKRRVGKYEVGRTIGEGTFAKVKFARNSETGEPVALKILDKEKVLKHKMAEQIRREIATMKLIKHPNVVQLYEVMASKTKIFIILEYVTGGELFDKIVNDGRMKEDEARRYFQQLIHAVDYCHSRGMVGLKHGILIEKLPMHILCAPENLLLDSYGNLKISDFGLSALSQQVRDDGLLHTSCGTPNYVAPEVLNDRGYDGATADMWSCGVVLYVLLAGYLPFDDSNLMNLYKKISSGEFNCPPWLSLGAMKLITRILDPNPMTRVTPQEVFEDEWFKKDYKPPVFEERDDSNMDDIDAVFKDSEEHLVTEKREEQPAAINAFEIISMSRGLNLENLFDPEQEFKRETRITLRGGANEIIEKIEEAAKPLGFDVQKKNYKMRLENVKAGRKGNLNVATEIFQVAPSLHMVQVSKSKGDTLEFHKFYKKLSNSLEQVVWTNNEVKKETAK

SEQ ID NO: 9844 - protein, 446 aa, Piromyces sp. E2
AKSIELEDKFENLGARIVQDVAIKTNDEAGDGTTTATVLARAIFAEGLKNVSAGVNPVELRRGVQKAVDVVVDFLKEKAHPISTFEEIAQVGTISANGDKHIGDLLAEAMKKVGKEGVINIHEGKTLEDELTITEGMKFENGYLSPHFITDNKGKKCELENPYILIIADDIQGDALATCVLNKIRGQVQVCCIKAPGYGDHRKNNLGDIACLTNATVMSANVELTLDKLKEEHLGTCERITVTREDTVFLNGAGDKAKIAERCNQIRSVIKEADLSVYEKERHEERLAKLTGGVAVIKVGGVSEVEVGEKKDRFVDALHATRAAIEEGIVPGGGTALLKASKVLTNLKADTFDQQLGVDLVKKAIQEPCKTIVNNAGGEGAVVVGRLYNSFEVKGVEDKAVSKKDYKPFAYGFDAYKGEYCDMIKAGIIDPVKVVRTAILDASGVA

SEQ ID NO: 9845 - protein, 343 aa, Saccharum sp.
MDHAADAHRTDLMTITRHVLNEQSRNPESRGDFTILLSHIVLGCKFVASAVNKAGLAQLIGLAGETNVQGEEQKKLDVLSNEVFVKALVSSGRTCVLVSEEDEETTFVDPKLRGKYCVCFDPLDGSSNIDCGVSIGTIFGIYMIKDKDNVTLSDVLQPGKDMLAAGYCMYGSSCTLVLSTGTGVNGFTLDPSLGEFILTHPDIKIPKKGKIYSVNEGNAKNWDVPVAKFVEKCKYPKDGSPPKSLRYIGSMVADVHRTLLYGGVFLYPADQKSPNGKLRVLYEVFPMSFLMEQAGGQSFTGKERALDLVPTKIHERSPIFLGSYDDVEEIKALYAEQAKSSSA

SEQ ID NO: 9846 - protein, 460 aa, Ralstonia metallidurans CH34
MSDMQEHKVTPYDQFNYEVPENVFPREGISANAAAAIVISDEWTDTNPMLNMSSFVTTFAEPEAREVAARNIFKNYIDHDMYPRLFAMEGRMVRWLHELWNGPKGVEPYGTCTVGSSEACMLGGLAHKWNWRQRRQAEGKDATRPNMVTGGNVQIVWKKFLRYFDVEPRIVPLKPGNYCLTAEDLDKYVDENTICVVAIAGQTFTGEDDDIQGIHDWLDAYEKRTGISIPMHIDGASGGFVNPFLYPDYKWDFRLPRVQSINASGHKYGLTPPGLGWVVFRERKIFNEELVFYVNYLGGEMPTATLNFSRNAFQVAVQYYQFLRLGFDGYKRVMQHTLDNAIFLRQQLVDSGYFDIMNTTQRIPVVAVTLNKKYKNFNEFDVSNKVREKGWVLSAYTMPPNAESVTSLRVVVRPHVNHNVAQLLANDIINACKFLEANGGNAKPPALHKHAEAQSTSLKC

SEQ ID NO: 9847 - protein, 193 aa, Magnetospirillum magnetotacticum MS-1
MKNSVLFDSVGLGPYTLRNRIVLPPLTRSRSSQPGNIPNDLMAAYYRQRTGAGFMVTEGTQIEPRGQGYAWTPGIHSPEQIAGWRKVTDTVHAEGGIIFLQLWHVGRVSHTSLQPGGAAPVAPSAIAANAVKVFIETGPGEGALAEPSIPRALTTAEVQGAGAALCAGGTQCARSRFRWRRDPLRERYLVNQF

SEQ ID NO: 9848 - protein, 738 aa, Chlamydia trachomatis D/UW-3/CX
MDPFFLNTQHVELLVSGKQSSPQDLLGIVSESLNQDRIVLFRPGAETVFVELRGKIQQAESHHSGIFSLPVMKGISPQDYRVYHQNGLLAHDPYAFPLLWGEIDSFLFHEGTHQRIYERMGAIPCEIDGVPGVRFIVWAPHAQRVSVIGDFNGWHGLVNPLHKVSDQGVWELFVPGLTAGACYKWEMVTESGQVLIKSDPYGKFFGPPPWSVSVVIDDSYEWTDSEWLEERIKKTEGPMNIYEVHVGSWRWQEGQPLNYKELADQLALYCKQMHYTHVELLPVTEHPLNESWGYQTTGYYAPTSRYGSFEDLQYFIDTMHQHGIGVILDWVPGHFPIDSFAMSGFDGTPLYEYTRNPSPLHPHWHTYTFDYAKPEVCNFLLGSVLFWIDKMHVDGIRVDAVSSMLYLDYGRYAGEWVPNRYGGRENLDAIRFLQQFNTVIHEKYPGVLTFAEESTTFPKITVSVEEGGLGFDYKWNMGWMHDTLHYFEKDFPYRPYHQSDLTFPQWYAFSERFLLPFSHDEVVHGKRSLIGKMPGDAWRQFAQLRLLLGYQICQPGKKLLFMGGEFGQGREWSPGRELDWELLDISYHQGVHLCSQELNALYVQSPQLWQADHLPSSFRWVDFSDVRNGVVAYLRFADADAKKALLCVHHFGVGYFPHYLLPILPLESCDLLMNTDDTRFGGSGKGFREPEILTPEIARQEREAAGLIEADDESGPDCWGLDIELPPSATLIFSVTLQ

SEQ ID NO: 9849 - protein, 90 aa, Kluyveromyces lactis
PAFVNKLWSMVNDKSNEKFIHWSTSGESIVVPNRERFVQEVLPKYFKHSNFASFVRQLNMYGWHKVQDVKSGSMLSNNDSRWEFENERHA

SEQ ID NO: 9850 - protein, 678 aa, Gibberella zeae PH-1
MAGNKLLVYLLRRDLRATDNPILHHLATSDHGFTHLLPIYILPPHQIETSGFVVEGQKSPYPLAKSQVGRFWRCGPLRAKFQAECIWDVKKNFENIGSGMLIRIGKFDDVLKHLIKSLNEDHQSIDTVWMTEEPSKEELDDQTAVASVCSKEGIGFKLWHDEKYFIDEKTQEPLRERPRPPLPRPQAGSLPSFPSWIPPQQAPFRIPDDYDEFERLLLEPVKAPIISDPPQFPEGAKSAHPFKGGETPAWDRLYHLIKSGAMTTYQETRNGLLGTEYSTKLSAFLAMGTITARSIHAELVKFEDGSEESYSRGFGFGKGENEGTRAVRFELLWRDYMRLCTFKFRTRLFKIDGFKGASGNYTKKWLTDREEDAEPDQNPTPAQVKDMIDRWIRGTTGMGLVDASQRELQLTGYTSNRARQNVASYLTKSLGIDWRLGAEYYEQSLIDYDTHSNWGNWQYQASCGNDPRSRSFNQVKQAFDYDQDGRFTRTWVNEVKSIDRLEHVFQICTCPKQELEKHGLSDNIMVTNPLKRIDFSVTKPRGNRRPYRWRKQGDRGRGGRGGRGGGTGNTSGNGDNRHNEPSPPNGGNRHNDFSPANGGSYMQGQPISGGYQQMAWRGNSHGLPSGRGYNSRQYMLDYSQQQQQPQHQLQHYYAHQQHQHPHPRQQQQQFYHQIPPHI

SEQ ID NO: 9851 - protein, 331 aa, Rhodobacter capsulatus
MAIELEGLGLSPELADVMTRLARVGADLARTIARNGVETDLAAGVGTNAGGDGQKALDVMADDAFREALTGTAVAYYASEEQDEVVTLGKGTLALAIDPLDGSSNIDVNVSIGTIFSIFPATDDPNTSFLRKGSEQIAGGYIIYGPQCALVCSFGRGVHHWVLDLDSRSFKRLPDIKALPQDTSEYAINASNYRHWPSPIRAFIDDLVAGAEGPRGRNFNMRWIASLVAETHRILMRGGVFLYPGDERKGYARGRLRHVYECAPIAFLITQVGGGATDGCEDILSALPDKLHARTPFVFGCAAKVARVTAYHDLPGQETSAPFNTRGLFRS

SEQ ID NO: 9852 - protein, 482 aa, Lactobacillus gasseri
MTGYTMPKGFLWGGAVAAHQLEGAWNEDGKGMSVADVMTVGSATKPREITDGVIPGKNYPNHDAIDFYHHYKGDIKLMAEMGFKAFRTSIAWTRIFPKGDEKEPNEAGLKFYDDLFDECHKYGIEPVITLSHFEIPYHLVKEYGGFTNRKLIDYFVRFARVCFKRYKNKVKYWMTFNEIDNQSSFNNDFLMATNSGILFKNGMGDKEKEAAMYQAAHYELVASALAVKEGHKINPDFQIGCMINYSPVRPLTPSSDDVLLADKFEQRRDFFSDVHVNGEYPNAVEDYIERNGYRPDITEEDKIALKEGTVDYVGFSYYQSTTVSSKKVKPDELTDLQEAIVENPTLQRSDWGWEIDPEGLRISLNHLTDRYHKPLFIVENGLGAYDKREADGSVHDPYRIDYLRKHIEQMEKAVVLDGVDLMGYLPWGCIDLVSAGTGQMDKRYGFIYVDKNDKGEGTLERSKKDSFDWYKKVIESNGKDLD

SEQ ID NO: 9853 - protein, 144 aa, Saccharomyces cerevisiae [sequence omitted]

SEQ ID NO: 9854 - protein, 238 aa, Glycine max
  misc_feature (80)..(80): Xaa can be any naturally occurring amino acid
SARALTSSSSTFIPKRYSFFFFLSILFALRSSSGGCSEYHHHHAPMATIGGLRDSQGSQNSVQTEALARFAVDEHNKKQXVRTQEQVVAGTLHHLTLEAIEAGEKKLYEAKVWVKPWLNFKELQEFKPAGDVPSFTSADLGVKKDGHQPGWQSVPTHDPQVQDAANHAIKTIQQRSNSLVPYELHEVADAKAEVIDDFAKFNLLLKVKRGQKEEKFKVEVHKNNQGGFHLNQMEQDHS

SEQ ID NO: 9855 - protein, 1128 aa, Oryza sativa
MSSSRPTQCSSSSSRTRQSSRARILAQTTLDAELNAEYEEYGDSFDYSKLVEAQRTTGPEQQARSEKVIAYLHHIQRAKLIQPFGCLLALDEKTFNVIALSENAPEMLTTVSHAVPSVDDPPKLRIGTNVRSLFTDPGTTALQKALGFADVSLLNPILVQCKTSGKPFYAIVHRATGCLVVDFEPVKPTEFPATAAGALQSYKLAAKAISKIQSLPGGSMEVLCNTVVKELFDLTGYDRVMAYKFHEDDHGEVFAEITKPGLEPYLGLHYPATDIPQAARFLFMKNKVRMICDCRARSIKIIEDESLHLDISLCGSTLRAPHSCHLQYMENMNSIASLVMAVVVNENEDDDEVGADQPAQQQKRKKLWGLLVCHHESPRYVPFPLRYACEFLAQVFAVHVNKEFELERQVREKSILRMQTMLSDMLLRESSPLSIVSGTPNIMDLVKCDGAALLYGGKVWRLQNAPTESQIRDIAFWLSDVHRDSTGLSTDSLHDAGYPGAAALGDMICGMAVAKINSKDILFWFRSHTAAEIRWGGAKHDPSDKDDSRRMHPRLSFKAFLEVVKMKSLPWNDYEMDAIHSLQLILRGTLNDDIKPTRAASLDNQVGDLKLDGLAELQAVTSEMVRLMETATVPILAVDSNGLVNGWNQKVAELTGLRVDEAIGRHILTVVEESSVPVVQRMLYLALQGKEEKEVKFEVKTHGSKRDDGPVILVVNACASRDLHDHVVGVCFVAQDMTVHKLVMDKFTRVEGDYKAIIHNPSPLIPPIFGADEFGWCSEWNAAMTKLTGWHRDEVINKMLLGEVFDSTNASCLVKNKDAFVSLCILINSALAGDETEKAPFSFFDRNGKYIECLLSVNRKVNADGVITGVFCFIQVPSHELQHALHVQQASQQNALTKLKAYSYMRHAINNPLSGMLYSRKALKNTGLNEEQMKEVNVADSCHRQLNKILSDLDQDSVMNKSSCLDLEMVEFVLQDVFVAAVSQVLITCQGKGIRVSCNLPERYMKQTVYGDGVRLQQILSDFLFVSVKFSPVGGSVEISCSLTKNSIGENLHLIDLELRIKHQGKGVPADLLSQMYEDDNKEQSDEGMSLAVSRNLLRLMNGDVRHMREAGMSTFILSVELASAPAK

SEQ ID NO: 9856 - protein, 907 aa, Pseudomonas syringae pv. syringae
MLLLTILPASLMAAMLGGYFTWMQLSELQSQLLQRGEMIAQDLAPLAANALGRKDKVLLSRIATQTLEQTDVRAVSFLDTDRTVLAHAGPTMISPSPIGSGSQLLSSTGTDATRYLLPVFGSQRHLTSPIIPAEADTLLGWVELEISHNGTLLRGYRSLFASLLLILTGLAFTATLAVRMSRTINGPMSQIKQAVSQLKDGNLETRLPPLGSRELDELASGINRMAATLQNAQEELQLSIDQATEDVRQNLETIEIQNIELDLARKEALEASRIKSEFLANMSHEIRTPLNGILGFTHLLQKSELTPRQFDYLGTIEKSADNLLSIINEILDFSKIEAGKLVLDNIPFNLRDLLQDTLTILAPAAHAKQLELVSLVYRDTPLALSGDPLRLRQILTNLVSNAIKFTREGTIVARAMLEDETEEHAQLRISVQDTGIGLSSQDVRALFQAFSQADNSLSRQPGGTGLGLVISKRLIEQMGGEIGVDSTPGEGSEFWISLKLPKAREDKEESLNIPLGGLRAAVLEHHDLARQALEHQLEDCGLQTIVFNNLENLLNGVTAAHETPAAIDLAVLGVTALEISPERLRQHIWDLENLNCKVMVLCPTTEHALFQLAVHDVYTQLQAKPACTRKLQKALSELIAPRAVRADIGPPLSSRAPRVLCVDDNPANLLLVQTLLEDMGAEVVAVEGGYAAVNAVQQEAFDLVLMDVQMPGMDGRQATEAIRAWEAERNQSSLPIVALTAHAMANEKRSLLQSGMDDYLTKPISERQLAQVVLKWTGLALRNPAPERQNEALEVHVGPLVLDHEEGLRLAAGKADLAADMLAMLLASLDADREAIRVARANQDVHALIERIHRLHGATRYCGVPQLRSACQRAETLLKQNAPHTEEALNDLDKAIIRLEAEARVMA

SEQ ID NO: 9857 - protein, 187 aa, Arabidopsis thaliana
MRTFSPKLLLLLLLVLRHHAESGSIVKFLPGFEGPLPFELETGYIGIGTLAKYWANDERVREALQIRKGSIGKWIRCNSNIHYDDDIISSIPYHMNNSINGYRSLIYSGDHDMEVPFLATEAWIRSLNYPIIDDWRPWIINNQIAGYTMTYANKMTYATIKASGHTAEYKPAESFIMFQRWISGQPL

SEQ ID NO: 9858 - protein, 451 aa, Arabidopsis thaliana
MLIPNKKLREMNRRQQVKRRVGKYEVGRTIGEGTFAKVKFARNSETGEPVALKILDKEKVLKHKMAEQIRREIATMKLIKHPNVVQLYEVMASKTKIFIILEYVTGGELFDKIVNDGRMKEDEARRYFQQLIHAVDYCHSRGVYHRDLKPENLLLDSYGNLKISDFGLSALSQQVRDDGLLHTSCGTPNYVAPEVLNDRGYDGATADMWSCGVVLYVLLAGYLPFDDSNLMNLYKKISSGEFNCPPWLSLGAMKLITRILDPNPMTRVTPQEVFEDEWFKKDYKPPVFEERDDSNMDDIDAVFKDSEEHLVTEKREEQPAAINAFEIISMSRGLNLENLFDPEQEFKRETRITLRGGANEIIEKIEEAAKPLGFDVQKKNYKMRLENVKAGRKGNLNVATEIFQVAPSLHMVQVSKSKGDTLEFHKFYKKLSNSLEQVVWTNNEVKKETAK

SEQ ID NO: 9859 - protein, 404 aa, Haemophilus somnus 129PT
MRVFPKSDKLEHVCYDIRGPVHQEALRLEEEGKKILKLNIGNPAPFGFEAPDEILVDILRNLPAAQGYCDSKGLYSARKAIVQYYQSKNILSATVNDVYIGNGVSELITMSLQALLNDGDEVLIPMPDYPLWTAAATLAGGKAVHYLCDEQADWFPDVADIKSKVTSRTKAIVIINPNNPTGAVYSKELLLDIVEVARQNGLMIFADEIYDKILYDNAVHHHIAALAPDLLTVTFNGLSKSYRVAGFRQGWMILNGPKHQAKGYIEGLDMLASMRLCANHPMQHAIQTALGGYQSINEFILPGGRLLEQRNKAYELINQIPGLSCTKPMGALYMFPKIDTKKFNIYDDEKMVLDLLRQEKVLLVHGRGFNWQQPDHFRIVTLPYVNQIEDALGRLARFLEYYRQ

SEQ ID NO: 9860 - protein, 439 aa, Arabidopsis thaliana
  misc_feature (117)..(117): Xaa can be any naturally occurring amino acid
  misc_feature (208)..(208): Xaa can be any naturally occurring amino acid
  misc_feature (214)..(214): Xaa can be any naturally occurring amino acid
  misc_feature (380)..(380): Xaa can be any naturally occurring amino acid
MAAAVSTVGAINRAPLSLNGSGSGAVSAPASTFLGKKVVTVSRFAQSNKKSNGSFKVLAVKEDKQTDGDRWRGLAYDTSDDQQDITRGKGMVDSVFQAPMGTGTHHAVLSSYEYVSXQGLRQYNLDNMMDGFYIAPAFMDKLVVHITKNFLTLPNIKVPLILGIWGGKGQGKSFQCELVMAKMGINPIMMSAGELESGNAGEPAKLIXRQRYRXAADLIKKGKMCCLFINDLDAGAGRMGGTTQYTVNNQMVNATLMNIADNPTNVQLPGMYNKEENARVPIICTGNDFSTLYAPLIRDGRMEKFYWAPTREDRIGVCKGIFRTDKIKDEDIVTLVDQFPGQSIDFFGALRARVYDDEVRKFVESLGVEKIGKRLVNSRXEGPPVFEQPEMTYEKLMEYGNMLVMEQENVKRVQLAETYLSQAALGDANADAIGRGTFY

SEQ ID NO: 9861 - protein, 230 aa, Zea mays
MWSSGSDRDEAVDTANASSVDASSPARQPSTPPPPPRRRRQRARRRAHRLRARNTGAGAEEEGLVEADADADDVWRGLQQQREREAWLRRASRPVVVVAGEEGSPPDASAGSGESGGVGRARSLTDDDLEELKGCVDLGFGFSYREIPELCGTLPALDLCYSMSQRFLDEHHHQQLGKAEEAPPLAPASPAQPAATTNWKISSPGDSPDEVKARLKYWAQAVACTVRLCS

SEQ ID NO: 9862 - protein, 341 aa, Desulfitobacterium hafniense DCB-2
MLPLFEPIRIKDLEIKNRIVMPPMALDIATEQGAITHKLIEHYRMRTRGVGMIIVEHAYVNPEGKAHPRQLGIHRDDLIPALEHLAAEIHKQGAVVGIQISHGGARSMGNICGPSSIQSQYLTRFGEADRKNCRVLPRKLDQEGIKGIIADFARAARRAQKAGFDFVEIHGAHGYLVNQFYSPLTNIRHDEYGGSLERRLTFPLEVVKSVRRVVGKSMPIFYRLGADDRLPGGNTVQDSALAAQALEAAGVDCLDLSGGISGYLRHGEEGFFAYMGQAIKPQVTIPVMVTGGIKTGNKANEMIAGGIADFVGVGRTLLKENEWAYKEWVRMGSGTCPYQAI

SEQ ID NO: 9863 - protein, 554 aa, Erwinia carotovora subsp. atroseptica SCRI1043
MCSIFGVLDLKSDPVELRKKALELSRLMRHRGPDWSGVYASDKAILAHERLSIVDVNTGAQPLYNAERTHILAVNGEIYNHQALRQQYGDRYAFQTGSDCEVILALYQEKGPEFLDELRGMFAFALYDSEKDAYLIGRDHLGIIPLYMGYDEHGNLYVASEMKALVPVCRTIKEFPAGSYLWSKDGEIREYYQRDWFDYDAVKDNETDKVALHDALEEAVKSHLMSDVPYGVLLSGGLDSSVISAITKKYAARRVEDDARSEAWWPQLHSFAVGLEGAPDLKAAQEVAKHLGTVHHEIHFTVQEGLDAIRDVIYHIETYDVTTIRASTPMYLMSRKIKAMGIKMVLSGEGSDEVFGGYLYFHKAPNAKELHEETVRKLLALHQYDCARANKAMSAWGVEARVPFLDKNFLDVAMRINPRDKMCGNGKMEKHILRECFESYLPHSVAWRQKEQFSDGVGYSWIDTLKEVAANQVTDQQLETARFRFPYNTPGSKEAYLYREIFEELFPVSSAAECVPGGPSVACSSAKAIEWDESFKTLDDPSGRAVGVHQSAYK

SEQ ID NO: 9864 - protein, 411 aa, Colwellia psychrerythraea 34H
MKAITKSSKLHNVCYDIRGQVAVEAKRLEDEGHKILKLNIGNPAPFGFEAPDDILKDVIHNLPNSQGYSESQGIYSARVAVMQYFQQQGIKDVMVDDIFIGNGVSELIVMAMQALLDNGDEVLIPAPDYPLWTAAVSLSGGKPVHYRCDEQNHWFPDLEDMESKITKKTKAIVLINPNNPTGAVYSEEVLHAIIALARKHGLIIYSDEIYDKILYDEAKHVPTAALATDVFIITLGGLSKNYRIAGFRAGWMVISGPKLHAEDYIKGIKLLSSMRMCANVPSQHAIQTALGGYQSINELIRDDGRLIKQRNVAYKMINDIDGLSCNPAMGALYLFVKVDNKKFNITNDERMVLDLLKQEKILLVHGRAFNVKEHNYFRLVFLPHVDELIPALEKLKSFFASYKQVQPSKSA

SEQ ID NO: 9865 - protein, 367 aa, Arabidopsis thaliana
METKQSIPLLMPYKMGPFNLSHRVVLAPLTRSRSYGNIPQPNAKLYYTQRTTPGGLLISESCVVSETSLGYPDLPGLWNRDQVEAWKPIVDAVHSKGGIFFCQIWHGGRVFHQDQPNGEAPVSSTDKPLMCKNMYGGQFKPPRRLRSDELPAIVNDFRIAARNAIEAGFDGVEVHGAHGYLIDQFLKDKVNDRSDQYGGSLENRCRFALEVIEAVVNEIGSDRVGIRLSPFADYMESGDSNPEALGLYLVQAMNKHVVYGHMVEPRMKTLEGIFECTESLTPMRKAFKGTFIVAGGYSREDGNKAVEEGRTDLVAYGRPFLANPDLTRRFELNEPLNRYDRSTFYTSDPVVGYTDYPFLETTDTTTA

SEQ ID NO: 9866 - protein, 341 aa, Pyrococcus horikoshii
MITIDGSYGEGGGQILRTSVALSTITGEPVRIVNIRANRPNPGLRPQHLHAILALKHLANAEVKGAHVGSRELVFIPKKLEAKEISIDIGTAGSITLVLQALLPAMVFAREKVKFRITGGTDVSWSPPVDYLSNVTLFALEKIGIHGEIRVIRRGHYPKGGGIVEGYVEPWNEKRELVAKEYSRIIKIEGISHATNLPSHVAERQARAAKDELLQLKVPIEIRTEISRSIGPGSGIVVWAETDCLRLGGDALGKKGKPAEIVGKEAAQELLDQLKPGHCVDKFLGDQLIPFLAFSGGVIWVSEITNHLKTNIWVVESFLGRIFDVDGNVGEPGKIRVIRRV

SEQ ID NO: 9867 - protein, 400 aa, Magnaporthe grisea 70-15
MATTQTTQGQIQPCRYKVGKTLGAGSYSVVKECVHIDTGRYYAAKVINKRLMAGREHMVRNEIAVLKKVSMGHQNILTLVDYFETMNNLYLVTDLALGGELFDRICRKGSYYESDAVDLIRATLSAVAYLHDHGIVHRDLKPENLLFRTPEDNADLLIADFGLSRIMDEEQFHVLTTTCGTPGYMAPEIFKKTGHGKPVDIWALGVITYFLLCGYTPFDRDSDLEEMQAILNADYSFTPIEFWRGVSDSAKDFIRRCLTIDPTKRMSAHEALQHPFVAGYLADKGANLLPTVKKNFNARRTLHAAIDTVRAINKLREGQGLNGQRLMAGVKSREPNKAAAAAAAAASIPTSTGEVGTVGAATHKDSGYGSTRPDALRPGVETNKVVETSKGLWTGVGSRG

SEQ ID NO: 9868 - protein, 113 aa, Triticum aestivum
GMTCNKAEGAMYLFPRLHLPQKAIGAAQAAGAAPDAYYALRLLQATGIVVVPGSGFGQAPGTYHFRCTILPQEDKIPAIISRFKEFHEKFMDEFRDVSRDEAPTGTTIESGGD

SEQ ID NO: 9869 - protein, 277 aa, Triticum aestivum
ISFLILNLKAGSPNTNKSQTPPTQKFPKIIRTQTEIPTPIRLPPPVSPPSSIPNEARVSARRTAMGSSKGSPPPSAAGPSSAGNAPAPVGPVPRPPEVAPFLTKVYDMVSDAATDKVMSWTDAGNSFVIWDAHAFERDLLSRHFKHRNFSSFIRQLNTYGFRKVDPDRWEWANEGFLRDQKHLLKIIKRKKRPQEAGRELEKAPVKAAPGTENIEIGRYGGLVKEVETLKRGGGVLMQQLVDLTHYQQSSNLEVQSLIQRLQVMEQNQKQMMALLSI

SEQ ID NO: 9870 - protein, 153 aa, Daucus carota
  misc_feature (65)..(65): Xaa can be any naturally occurring amino acid
DPKHLRRPQQRLRPLLPRHLRPLPRLPQRSLHRYRGRTERSHGTCNMRIDWKETPDDVFKADMPXLKKEEVKVEVEEGRVLQISGERSREQEEKNDKYHRVERSSGKFLRRFRLPENVKMEEVKACMENGVLTVTVRKWRRRSRNVKAIDISG

SEQ ID NO: 9871 - protein, 645 aa, Bacillus cereus ATCC 14579
MNVINCEEVKRDEFHTEKYYESYNIFGAHVVTEDEIQGVRFTVWAPHAKAMSVVGDFNEWDYEQHKMLQVTEEGIWSLFIPHIEEGEIYKYAIETLAGDVILKADPYAVYAEVRPNTASVVFDIKGYEWNDKNWNRKKKKKSIYKEAMTVYELHFGSWKKKEDGTLYSYREMVEELIPYVVEHQFTHIEIMPLVEHPYDRSWGYQGTGYYAATSRFGTPHDLMHFVDECHKYGIGVILDWVPGHFCKDAHGLYLFDGTPTYEYKDKDVQENPVWGTVNFDLGKREVRNFLISNALFWMRYFHIDGFRVDAVANMLYWNKEGQEQSNEHAVSFLRELNEAVFAEDEDFLMTAEDSTAWPLVTTPTYEGGLGFNYKWNMGWMNDVLKYMECAPEYRKHIHEKMTFSLLYAYSENFILPLSHDEVVHGKKSLLNKMPGDYWDKFAQLRLLYGYFFTHPGKKLLFMGGEFGQFDEWKDLEDLDWNLHDFEMHRYMHDYFKELIALYKRSKPLWQLDHSPEGFQWIDANNNEQSIFSFIRQGDKQEDALVIVCNFTKATYENYKVGVPDFEYYNEILNSDAQQYGGSGQVNKKRLKTILEPYHNQAAHVEITIPPFGVSILRPVKTRKGSKKQDGSKTKVRSNVTSRGKR

SEQ ID NO: 9872 - protein, 706 aa, Pseudomonas tolaasii
MAQLKDGNLETCLAPLGSQELDQLASGINRMAETLQNAQEELQHSIDQATEDVRQNLETIEIQNIELDLARKEALEASRIKSEFLANMSHEIRTPLNGILGFTHLLQKSELSPRHVDYLGTIEKSADNLLGIINEILDFSKIEAGKLVLDSVPFNLRDLLQDTLTILAPAAHAKQLELVSLVYRDTPLAVVGDPLRLKQILTNLISNAIKFTREGTIVARAMVEDEEEDSVQLRISVQDTGIGLSNQDVRALFQAFSQADNSLSRQPGGTGLGLVISKRLIEQMGGEIGVDSTPGEGSEFWISLNLPKTRDDVDDLPSAPLLGRRVAVLENHDVARQALQHQLEDCGLEVTPFNTLESLTNGITSTHQTEQAIDLAVLGVTANDIPPERLNQHLWDLEHLGCKVLVLCPTTEQMLFNQSVPNPNSQLQAKTPCTRKLRRALADLISPPVAQRTREPLSSRAPRVLCVDDNPANLLLVQTLLEDMGAKVLAVESGYAAIDAVKQETFDLVLMDVQMPGMDRRQSTEAIRQWESERHGTPLPVVALTAHAMANEKRALLQSGMDDYLTKPISERQLAQVVLKWTGLALRNQGPERGNDNLGHGVQLLVLDHEEGLRAAANKADLAADMLAMLLASLEADRLAITVAREAKDNNALIERIHRLHGATRYCGVAELRAACQRAETLLKQDDAQGHGALDELDMAIGAAGQ

SEQ ID NO: 9873 - protein, 639 aa, Lactuca sativa
MMMDSCDCFETQWPADELLVKYQYISDFFIAFAYFSIPLELIYFVQKSAFFPYRWVLMQFGAFIVLCGATHFINLWTFSSHSKTVAIVMTIAKLSTAFVSCVTALMLVHIIPDLLSVKTRELFLKQRAEDLDREMGLIIKQEETGRHVRMLTHEIRSTLDRHTILKTTLIELGRTLDLEECVLWMPSRKGMILQLSHSLHNLIPFASTVPINLPIITEVFNSAEAIRIPHNCPLARIRTPVGSYIPPEVVAVRVPLLHLSNFEIDNWPDHSAKSYAVMVLILPLNGVRKWRDHELELVTVVADQVAVALSHASILEESMRARDQLMDQNFALNVARQEAEMAIHARNDFLAVMNHEMRTPMHAIIALSSLLLETELTPDQRAMIETILKSSNLLATLVNDVLDLSRLEDGSLELESEVFNLHGLLREVVRLINPIASVKNTSMTLNCDVDLPNFGVGDEKRLMQIILNVVGNAVKFTKGGHVSIQASVLNPEYLQEWQTPEFCPTFTQGLFYLLVQVKDSGSGIKQQDIPHIFTKFSEPRSASNRSGDGAGLGLAICKRFVDMMGGHIWIESGGLGKGTTVAFLVKVGECNYQNDLSIVRPKARTRPHQGSGELIKHRGDESYRGGGTASFPAHDHNSF

SEQ ID NO: 9874 - protein, 445 aa, Lactuca sativa
MAIEIVQPSVGLSKIAVSETHGEDSPYFAGWKAYDENPYDEVHNPTGVIQMGLAENQVSFDLLEEYLEANLEASNWGQKVSGFRENALFQDYHGLQSFRKAMASFMEQVRGGKAKFNPDRVVLTAGATAANELLTFILADPGDALLVPTPYYPGFDRDLRWRTGVQIVPIHCESSNNFQITPEALEAAYDHARAMNIKVRGVLITNPSNPLGATIQRKVLEEILDFVTRKNIHLVSDEIYSGSAFYADEFVSIAEVLESRDYKDAERCHIVYSLSKDLGLPGFRVGTVYSYNDQVVTTARRMSSFTLISSQTQFLLASMLSDKEFTQKYIKINRERLKKRYEMIINGLRKAGIECLEGNAGLFCWMNLSPYLEDATINSEIAIWKTIMHEVRLNISPGSSCHCSEPGWFRVCFANMSEETLDVALSRIHEFIERRKQDRQMVCIQ

SEQ ID NO: 9875 - protein, 737 aa, Lactuca sativa
MDSCNCIEPQWPADELLMKYQYISDFFIALAYFSIPLELIYFVKKSAVFPYRWVLVQFGAFIVLCGATHLINLWTFNAHTRTVAIVMTTAKVLTAAVSCATALMLVHIIPDLLSVKTRELFLKNKAAQLDREMGIIRTQEETGRHVRMLTHEIRSTLNRHTILKTTLVELGRTLGLEECALWMPTRSGLELQLSYTLRHQNPVGFTVPIQSPAINQVFSTNRAVKISPTSPVARLRPASGKYMLGEVVAVRVPLLHLNNFQIYDWPELSTKRYALMVLMLPSDSARQWHVHELELVEVVADQVAVALSHAAILEESMRARDLLMEQNVALDLARREAETAVRARNDFLAVMNHEMRTPMHAIIALSSLLQETDLTPEQRLMVETILKSSNLLATLINDVLDLSRLEDGSLELDTTTFNLHALFKEVLNLIRPVASVKRLFVTLSLSSDLPEYAVGDEKRLMQIILNIIGNAVKFSKEGSISISAIMAKPDSLRDPRAPDFFPLLSDNNFFLRVQVKDTGMGISQQDMPKLFTKFAESQSPATRNPGGSGLGLAICKRFVNLMEGNIWIESEGLGKGSTAIFFVKLGFPSRLNGSRLPHMRVPAKLGQTKFPGLKVVVVDDNGVSRTATKGLLVHLGCDVTTVSSGEECLQAITKDSYKVVFIDVSLSSDAYNVARLVHEKLPKRHEKPPPLIVGLTGNTDKAMKESLLRAGMDGLVLKPVSVEKMRLALSELLEHNT

SEQ ID NO: 9876 - protein, 738 aa, Nicotiana tabacum
MDCNCFDPQWPADELLMKYQYISDFFIAVAYFSIPIELVYFVQKSAVFPYRWVLVQFGAFIVLCGATHLINLWTSTAHTRTLAIVMTTAKVLTAVVSCATALMLVHIIPDLLSVKTRELFLKNKAAELDREMGLIRTQEETGRYVRMLTHEIRSTLDRHTILKTTLVELGRTLALEECALWMPTPPGLELQLSYTLRHQNPIGFTVPIQLPVINQVFGTNRAVKISPNSPVARLRPAGKYMPGEVVAVRVPLLHLSNFQINDWPELSTKRYALMVLMLPSGSARQWHVHELELVEVVADQVAVALSHAAILEESMRARDLLMEQNVALDLARREAEMAVRARNDFLAVMNHEMRTPMHAIIALSSLLQETELTPEQRLMVETILKSSNLLATLINDVLDLSRLEDGSLQLDVGTFNLHVLFRKVLNLIKPIASVKNCLSRLTCLQICPEFAIGDEKRLMQILLNVVGNAVKFSKEGSVSISAVAAKSESLSDPRAPEFFPVQSENHFYLRVQVKDTGSGINPQDIPKLFCKFAQNQALATKSSGGTGLGLAISKRFVNLMEGHIWIESEGLGKGSTAIFIVKLGIPGRSNEPKLPFMPRLPANHMQMTFQGLKVLIMDDNGFSRMVTKGLLVHLGCDVTTVSSGDECLRVLTQEHKVVFMDVSIPGIDCYEVAVQIHEKFGKHHNRPLIVALTGNTDRVTKENCMRVGMDGVILKPVSVDKMRSVLSELLEHGVILQS

SEQ ID NO: 9877 - protein, 482 aa, Streptomyces avermitilis MA-4680
MASAETSAAPVSPVTFPPAFLWGAATSAYQIEGAVREDGRTPSIWDTFSHTPGKTAGGETGDIAVDHYHRYRDDVALMAELGLGAYRFSVSWSRVQPMGRGPAVQRGLDFYRRLVDELLAHGVKPALTLYHWDLPQELEDAGGWPERDTAYRFAEYAQIVGDALGDRVEQWITLNEPWCSAFLGYGSGVHAPGRTDAAASLRAAHHLNLAHGLGTSALRAAMPARNTVAVSLNSSVVRTVSDSPADVAAGRRIDDLANGVFHGPMLHGAYPAGLFAATASVTDWSFVQDGDLEAVNQPLDALGLNYYTPTLVSATESAPAGPRADGHGASSFSPWPGADDVVFHLTPGERTEMGWSIDPTGLHELIMRYTREAPGLPLYITENGAAYDDKPDPEGRVHDPERIAYLHGHLTAVRRAITDGADVRGYYLWSLMDNFEWAYGYGKRFGAVYVDYATLARTPKSSARWYAQAARTGTLPGATAAE

SEQ ID NO: 9878 - protein, 552 aa, Ehrlichia canis str. Jake
MANVVVTGEQLDKAIREVVHILEDAVGCTAGPKGLTVAISKPYGAPEITKDGYKVIKSIKPEDPLALAIANIIAQSASQCNDKVGDGTTTCSILTAKVIEEVSKAKAAGADIVCIKDGVLKAKEAVLDALMSMKREVLSEEEIAQVATISANGDKNIGVKIAQCVQEVGKDGVITVEESKGFKELDVEKTDGMQFDRGYLSPYFVTNSEKMLVEFENPYILLTEKKLNIIQPILPILENVARSGRPLLIIAEDVEGEALSTLVLNKLRGGLHVAAVKAPGFGDRRKDMLGDIAILTGAKHVISDDLAIKMEDLTLAELGTAKNIRITKDTTTIIGSVDNSSDNVQSRINQIKVQIESSTSDYDKEKLRERLAKLSGGVAVLKVGGSSEVEVKERKDRVEDALHATRAAVEEGVVPGGGAALLYTLSVLENLKSKNDDEQLGINIIKRALQAPIKRIIRNSGSENAPCVIAHLLKQNDKELIFNVDTMNFANAFTSGVIDPLKVVRIAFDFAVSLAAVFMTLNAIVVDVPSKDDAGAAGGAGGMGGMGGMGGF

SEQ ID NO: 9879 - protein, 189 aa, Oryza sativa
MGRGKIEIKRIDNATSRQVTFSKRRSGLFKKARELSILCDAEVGLLVFSSTSRLYDFASSSMKSIIERYNETKEDPHQTMNASSEAKLWQQEAASLRQQLHNLQEYHRQLLGQQLSGLDVEDLQNLESKLEMSLKNIRLRKDNVMMDQIQELSRKGSLIHQENMELHKKVSLVHQENINLQKKVAVPTA

SEQ ID NO: 9880 - protein, 485 aa, Arabidopsis thaliana
MDVSKVTTSDGGGDSMETKPSPQPQPAAILSSNAPPPFLSKTYDMVDDHNTDSIVSWSANNNSFIVWKPPEFARDLLPKNFKHNNFSSFVRQLNTYGFRKVDPDRWEFANEGFLRGQKHLLQSITRRKPAHGQGQGHQRSQHSNGQNSSVSACVEVGKFGLEEEVERLKRDKNVLMQELVRLRQQQQSTDNQLQTMVQRLQGMENRQQQLMSFLAKAVQSPHFLSQFLQQQNQQNESNRRISDTSKKRRFKRDGIVRNNDSATPDGQIVKYQPPMHEQAKAMFKQLMKMEPYKTGDDGFLLGNGTSTTEGTEMETSSNQVSGITLKEMPTASEIQSSSPIETTPENVSAASEATENCIPSPDDLTLPDFTHMLPENNSEKPPESFMEPNLGGSSPLLDPDLLIDDSLSFDIDDFPMDSDIDPVDYGLLERLLMSSPVPDNMDSTPVDNETEQEQNGWDKTKHMDNLTQQMGLLSPETLDLSRQNP

SEQ ID NO: 9881 - protein, 741 aa, Malus x domestica
MLACNCIEPQWPADELLMKYQYISDFFIALAYFSIPLELIYFVKKSAVFPYRWVLVQFGAFIVLCGATHLINLWTFSIHSRTVAMVMTTAKVLTAVVSCATALMLVHIIPDLLSVKTRELFLKNKAAELDREMGLIRTQEETGRHVRMLTHEIRSTLDRHTILKTTLVELGRTLALEECALWMPTRTGLELQLSYTLRQQNPVGYTVPIHLPVINQVFSSNRAVKISANSPVAKLRQLAGRHIPGEVVAVRVPLLHLSNFQINDWPELSTKRYALMVLMLPSDSARQWHVHELELVEVVADQVAVALSHAAILEESMRARDLLMEQNIALDLARREAETAIRARNDFLAVMNHEMRTPMHAIIALSSLLQETELTAEQRLMVETILRSSNLLATLINDVLDLSRLEDGSLQLEIATFNLHSVFREVHNMIKPVASIKRLSVTLNIAADLPMYAIGDEKRLMQTILNVVGNAVKFSKEGSISITAFVAKSESLRDFRAPDFFPVQSDNHFYLRVQVKDSGSGINPQDIPKLFTKFAQTQALATRNSGGSGLGLAICKRFVNLMEGHIWIESEGLGKGCTATFIVKLGFPERSNESKLPFAPKLQANHVQTNFPGLKVLVMDDNGVSRSVTKGLLAHLGCDVTAVSLIDELLHVISQEHKVVFMDVSMPGIDGYELAVRIHEKFTKRHERPVLVALTGSIDKITKENCMRVGVDGVILKPVSVDKMRSVLSELLEHRVLFEAM

SEQ ID NO: 9882 - protein, 372 aa, Triticum aestivum
GPECSGYRRPTRPNIFLTDGASPAVHMMMQLLIRSEKDGILCPLPQYPLYSASIALHGGAFVPYFLDEEAGWGLEVDELKKQVDEARSKGITVRALVVINPGNPTGQVLAEENQKKIVEFCKNEGLVLLADEVYQENIYVEDKQFHSFKKIARSMGYTDDDLPLVSFQSVSKGYYGECGKRGGYMEVTGFNADVREQIYKVASVNLCSNISGQILSSLIMNPPKVGDESYESFMVERDGIISSLARRAKALEEAFNSLEGITCNKAEGAMYLFPRLHLPQKAIGAAQAAGAAPDAYYALRLLQATGIVVVPGSGFGQAPGTYHFRCTILPQEDKIPAIISRFKEFHEKFMDEFRDVSRDEAPTGTTIESGGD

SEQ ID NO: 9883 - protein, 157 aa, Arabidopsis thaliana
MSLIPSIFGGRRTNVFDPFSLDVFDPFEGFLTPSGLANAPAMDVAAFTNAKVDWRETPEAHVFKADLPGLRKEEVKVEVEDGNILQISGERSNENEEKNDKWHRVERSSGKFTRRFRLPENAKMEEIKASMENGVLSVTVPKVPEKKPEVKSIDISG

SEQ ID NO: 9884 - protein, 391 aa, Lactococcus lactis subsp. lactis Il1403
MPNQLTDHVTLRHGATLNNRIVMSPMQTHSGLKGGFASDDTIQYYSARSRAAGMLITEFHYVSENGGPAYVPGYPEQLGAYSDAHLEGLRKTVQALKKDGNKAILQIHHAGRAAVGRHVNGLDVVAPSAIDFSFLDYPVRELTITEIDDIILDFGKATKRAIDAGFDGVEIHGANHYLIQQFFSKLSNLRTDKWGGSLNKRMAFPLAVVKEVKAIVDEYAPKGFIIGYRISPEELHGKNVGYDYTEALTLISEVIKYELDYIHLSLWAGYNSKPENSEKSYAELFKEILDDKTKLLIVGGIFGEDTATDAIENYADLIAVARGTLIDPNFAKKVTEGKGDTILHKISPETVEYSHLTPGLLEAFSREDSLGLPPLPGGETIRHLHTGKYDI

SEQ ID NO: 9885 - protein, 464 aa, Listeria monocytogenes EGD-e
MTYKFPENFWWGSAASGPQTEGAADVDGRKPSIWDHWYKIEPGRFFNDVGPTNTSNFYYQYKEDIALMKQTGHNSFRTSIQWSRLIPDGIGEVNPKAVDFYNRVIDEMLANDVEPFMNLYHFDMPMSMQEKGGFESREVVDAYATFAKTCFELFGDRVKHWFTFNEPIVPVEAGYLYDMHYPNVVDFKRATQVAYHTTLAHALAVKEFHALEIPEGQIGIILNLTPSYPRSQNPADLKAAHIADLIFNRSFLDPVTKGEFPTDLVEIIREHDALPEYTEEDLAIIKNNIIDILGVNYYQPRRVKAKEYAAHPDAPFMPEHLFDNYEMPYRKMNPYRGWEIFERAIYDIAINLRDNYDNIPFFISENGMGVEGESRYRNADGMIEDTYRIDFIKSHLKWLHKAIEEGANCHGYHLWTFMDCWSWANAYKNRYGLVEVDLDNDFKRTVKASGHWYKELAENNGFED

SEQ ID NO: 9886 - protein, 365 aa, Arabidopsis thaliana
MLAGLAFKRKWQNKRKAEGKPYDKPNIVTGANVQVCWEKFARYFEVELKEVNLSEGYYVMDPDKAAEMVDENTICVAAILGSTLNGEFEDVKRLNDLLVKKNEETGWNTPIHVDAASGGFIAPFIYPELEWDFRLPLVKSINVSGHKYGLVYAGIGWVVWRAAEDLPEELIFHINYLGADQPTFTLNFSKGSSQIIAQYYQLIRLGFEGYKNVMENCIENMVVLKEGIEKTERFNIVSKDQGVPVVAFSLKDHSFHNEFEISEMLRRFGWIVPAYTMPADAQHITVLRVVIREDFSRTLAERLVADISKVLHELDTLPSKISKKMGIEGIAENVKEKKMEKEILMEVIVGWRKFVKERKKMNGVC

SEQ ID NO: 9887 - protein, 104 aa, Arabidopsis thaliana
  misc_feature (44)..(44): Xaa can be any naturally occurring amino acid
  misc_feature (55)..(55): Xaa can be any naturally occurring amino acid
  misc_feature (89)..(89): Xaa can be any naturally occurring amino acid
INVSGHKYGLVYAGIGWVVWRAAEDLPEELIFHINYLGADQPTXTLNFSKGSSQXIAQYYQLIRLGFEGYKNVMENCIENMVVLKEGVXETRGVQHRKGPRGFP

SEQ ID NO: 9888 - protein, 547 aa, Pseudomonas aeruginosa
MAAKEVKFGDSARKKMLVGVNVLADAVKATLGPKGRNVVLDKSFGAPTITKDGVSVAKEIELKDKFENMGAQLVKDVASRPTDAAGDGTTTATVLAQAIVNEGLKAVAAGMNPMDLKRGIDKPTVAIVAQLKELAKPWRDTKAIAQVGTISANSDESIGQIIAEAMEKVGKEGVITVEEGSGLENELSVVEGMQFDRGYLSPYFVNKPDTMAAELDSPLLLLVDKKISNIREMLPVLEAVAKAGRPLLIVAEDVEGEALATLVVNNMRGIVKVAAVKAPGFGDRRKAMLQDIAILTGGTVISEEVGLSLEGATLEHLGKPKRVVINKENTTIIDGAGVQADIEARVLQIRKQIEETTSDYDREKLQERLAKLAGGVAVIKVGAATEVEMKEKKAPVEDALHATRAAVEEGVVPGGGVALVRALQAIEGLKGDNEEQNVGIALLRRAVESPVRQIVANAGDEPSVVVDKVKQGSGNYGFNAATGVYGDMIEMGILDPAKVTRSALQAAASIGGLMITTEAMVAEIVEDKPAMGGMPDMGGMGGMGGMM

SEQ ID NO: 9889 - protein, 127 aa, Brassica napus
  misc_feature (69)..(69): Xaa can be any naturally occurring amino acid
  misc_feature (78)..(78): Xaa can be any naturally occurring amino acid
DEHCKRYMFMTEEDITSLPCFQNQTLLAIKAPTASCIEVPDPDEVMSFPQRQYRMVIRSRMGPIDVYLXRTKHGCSKXKGDSSMETDESAVDTSSLKIVTSDTDLKTDYWFESGEEVTLTDLWNNFC

SEQ ID NO: 9890 - protein, 488 aa, Pseudomonas fluorescens PfO-1
MIQTETDMQLIWLRSDLRQHDNTALAAAAERGPSVAVYLLSPQQWQEHDDAPCKIDFWLRNLHKLSKSLGDLNIPLLIRTAPHWDQAPAVLLELCRQLKIEAVHVNEEYGINESRRDAAVAKALQAEGITFHSYLDQLLFKPGSVLTRTGTYFQVFSQFRKVCYEHLHRSMPSLKQAPGKQSALNIASDPVPEAIEGFPTPGASLRALWPAGETEARRRLDTFADAQIDYYKSERDFPAKPGTSQLSAYLAAGVISPRQCLHAALQSNQGEFESGKVGAVTWINELLWREFYKHILVGYPRVSRHRAFRPETEDLAWRNAPEDLAAWQEARTGLPIIDAAMRQLLETGWMHNRLRMVVAMFLTKNLLIDWREGERFFMRHLIDGDLAANNGGWQWSASTGTDSAPYFRIFNPVSQSEKFDSEGLFIKHWLPELAGLNKKEIHNPASVGGLFGVADYPAPIVNLSASRERALAAFKNLPSRSSQGESDE

SEQ ID NO: 9891 - protein, 536 aa, Methanosarcina acetivorans C2A
MASKQIMFDENARKTLLTGVDKVANTVKITLGPKGRYVVLDKSTKPVVTNDGVTIAKEIELHDKFENMGAKLVKEVASRTQDNTGDGTTTATLLAQSMIREGLKNISAGANPIEVKKGIEFATEKVVEYLKNKSVEVKGKDKIIQVATVSANNDEEIGNLITDAMERVGYNGVITVEDSKTMETSLDVVEGMQFDRGFVSPYMALDTEKMNCEFEDPYILITDKKINSMKQIVPVLEKVASEGRSLLIIAEDVDGDAQAALILNIIRGSLRVCAVKAPGFGNERKEMLEDIAVLTGGQVISEEKGMKLEEFSDYMLGSARKVTVDNNKTIIVEGRGDKEKIEERVRIIEAQVNIAEADYRKTELKKRQAKLGGGVAVIKVGAATETELKEKKMRIDDALNATKAAVEEGVVTGGGVSLFRAAATLDSLSLGGDRQVGVKIVQRSIEDPVRQIAANAGREGAEVVATIRAESSERFGYNAKRDVFEDLFEAGVIDPTKVVRSGLQNAASIAGMVLTTEALVTDFDEEKDDRTAAIII

SEQ ID NO: 9892 - protein, 393 aa, Desulfitobacterium hafniense DCB-2
MQESRWKEYLKNLGWVLAIGSLIFTVVVGGFIVTNLDHLGRLARVVKLVESDYLEEVSVDTLIEGATKGIVDSLGDPYSSYMNAQENEELMQQIEGKFGGVGIILSLKDPQKLVVLRPIKNTPAAKAGLQPGDVIIKIDDVDATTIDQEKAVSLMRGNPGTNVTLVVYRESIKQNVTVPLTRENIAVPTVEGLALPGNSDIAYIGISQFSSHTALELNEVLRNMDISKYKGMILDLRYNHGGELESAVGVASYFVQPGPIVYIVDKGGNAVTKASEGNYLGIPFVVLVNEESASAAEIVSGAIKDRGTGTLVGTKTFGKGIVQTIYQLDRGTSVKLTTAKYLTPNKIDIHKKGIEPDVEVKLKDGEEATLSPTTKAFDTQLTEALKVLRQQMK

SEQ ID NO: 9893 - protein, 972 aa, Vibrio fischeri ES114
MIPALLLFPKCFNIMLFASTGIGRKLLITFMVMIALMAFGSVVGVLGFSYVEKTERTVIDSAIPAVIEARYISDLSTKIISTSQLLSQVDSEDDRKKYGKDLFESIESLYHRLKGLGVYPFDKALLARLDLQVQDIVDNLATMGESVGEKVVLHRTIQEKSQKLTETALRLEELSRSQVLNSNTVTIANVVKIYDLVENGEKEAVYKALDTLVETDLDLAERLHELRLLTFKVVNTIDDARNSHNIKKIEKLRQDFTRDMTIITRRVQAVEDPSRTKQMLDLANDLTKSERLFNELIQLVNINQKLKLLGDENVHKFQELNLTISQLLEQANDVTQQAVADVNFVLKVVQQLLISITMLGLCLVIYIMWRYVYARVITRLNQYEEAITNVANGQLDIELDTTGDDELARMGRSILIARDTAQELKEYKDSLELQIAQRTQELKSSNERLNVEIINHDKARDLAEQANRAKSAFLATMSHEIRTPLNGVLGTGELLRGSGLTAQQKQYVDIINRSGENLLDLLNDILDYSKIEAGHLSIRKKNFSVQSMITDVHHLFSSRAQQKGITLSVNVPVDTPEWWSGDCSRIRQVLNNFVGNAIKFTHTGSVTIQLSLILDTTLLFEVIDTGVGIAEHEIDTLFDVFTQAEEGMKVSGGTGLGLAISQRLIEAMDGEIGVESIEGQGSTFWFSLELDEGQPVESLSDDKTAIDIAPVNILLVEDNPVNQMVAIGFLERLGHHVIAVDTGKKAEEAIEKHQFDLLLLDINLPDTDGVTLQKRLREIYATKDDHQDELPMLAVSAHVFHEDVESYLSAGFNGFLAKPLVENQLVSTLNRILNDGKSNLKAPVIIPSLQLEMEAGIETEENEMILNEKVLQGDINVLGEDRMRKIVGVFKTSSKENLEELQTAISNQDCYQVNQLAHKLKGSAGSMGLMQLHTLCHQYEQYGKNNDISLCRNDEISQVYGAAILALDAFFK

SEQ ID NO: 9894 - protein, 1390 aa, Cryptococcus neoformans var. neoformans JEC21
MSLPDAYPPVIATEGSTAFQSHILSLLSVISQHPSPDYPFPSSGDSTLQDNASVTAKKNATLSTFPGKKTPAEDAIERAIIALGDRVWTSERTQAHLVKDVKRDVPAQPGSDLLTPDWTPPVPTLNDSSPDPVCPTCTRPVSSSETSSFTPQQIASFYHPFTAALSTPPPPLPEQMFFPQSVLAAYVSATSDSESAGDSGMSAEKELELLKAQVQDIARVCKAVATGDLTQKIIVPVKGQTMTELKNIINAMVDRLQTFAVEVERVSLEVGTEGKLGGQAVVPNVEGTWKVLTAVVNKLAANLTNQVRSIAKVTKAVAKGDLSETIDVEASGEIAELKTTVNGMVMSLRTLADEVSRVSLEVGSQGKLGGQANVPDVEGVWKDLTVNVNRMCESLTTQVRSIGSVTTAVARGDLSKMIEIEAEGEMAVLKNTVNSMVRQLTVFAKEVTRVALEVGTHGQLGGQAVVPGVEGVWDDLTTNVNKMARNLTDQVREIAMVTKAVARGDLSKTVNADVQGEILDLKCTVNEMLTNMPCKVAQLTVFAAEVTRVSLEVGTEGKLGGQAVVPNVEGTWMVLTDNVNLMALNLTTQVRSVAEVTTAVAAGDLSKKINVAAFGEILELKNTVNNMVDSLRSFSSEVTRVAREVGTDGRLGGQAKVPGVAGTWKDLTDCVNIMAANLTEQVRTIAHATTAVARGDLTQKVVGVKVSGEILDLVNTINNMIDQLAIFAAEVTRVAREVGTEGKLGVQAEVENIEGTWQEITSNVNTMASNLTSQVRAFAQISAAATDGDFTRFITVEASGEMDSLKTKINQMVYNLRESIEKNTKARQEAEMANRSKSEFLANMSHEIRTPMNGIIGMTVLTLESELTRQQRENLMIVSSLAGSLLTIIDDILDISKIEAGRMTMEQIPFSLRVAVFSVLKTLCVKAAQNKLDLIFDVDPTMPDQLIGDPLRLRQVITNLIGNAVKFTTKGQVALSCRVKRYVTVADAVELEFCVADTGIGIKQDKLDVIFDTFAQADGSTTRKYGGTGLGLTISKRLVNLMSGDLWVESEYGQGSRFYFTTVAEMTSVPRDQIIERLSPWSGRSVLFIDTLGDQTGIVEMLQELGLKPIVIHSVNDVYLLQDQGLTVFDTMIVDSLKAAGELRGIEYLRYIPIVLLAPSNKPSGPSNPSFISLPESRRRLLALPSASEQLLSPIPVKDCLEMGINTYYTTPLSLQELSNAIVPALESHQIQPGDTVKDTILSVLLAEDNLVNQKLAVKLMEVAGHKIEVADNGEIALEKYKRRQLARTPFDVILMDVSMPVMGGMEATGLIREFEANEGVPRTPIIALTAHAMIGDKERCLAAGMDEYVTKPLRRGDLLASIAKVLAPKQSASGLEMPAVPIPANIYGR

SEQ ID NO: 9895 - protein, 239 aa, Zea mays
  misc_feature (44)..(44): Xaa can be any naturally occurring amino acid
  misc_feature (53)..(53): Xaa can be any naturally occurring amino acid
  misc_feature (66)..(66): Xaa can be any naturally occurring amino acid
  misc_feature (72)..(72): Xaa can be any naturally occurring amino acid
LGEQTKPALATASNERVGEGKGLGGYVKSLTDEQMEVLRKQISXYATICEQLXEMHRVLTEHQDIXAGMSVXNLYCDPLIIAGGHKITARQRWQPAPMQLQILESIFDQGNGTPSKQKIKEIAAELSQHGQISETNVYNWFQNRRARSKRKQAAASLPNNAESEAEADEEPLADKKPKSDRPPPPPPPIQDNTKATGALSADRVSGGTRHLDTGHDQTSGVMYGCNDSGSLRSSASSGV

SEQ ID NO: 9896 - protein, 701 aa, Schizosaccharomyces pombe
MEFLNIPTKNTFHWSCDPLFNELKRLSCFKSFTYENDLKTFKALRSQLCLSHPSINSLSSFQTYHQLLCVLEQKHLSECVAPFVWTLSSSSNERESFENLIFEHACLIYRLACTYHTTAISLCNEKPPNLVQACQYFQLSAGCFRYINDFYIYTKSLDFNENLLKAWEIYCLAEAQTCIFSKANSNDTTSESIIVKILAKVFLLYEDAYKLFKNATGAPSIFVHWTYIQKLFYQTITYQIISRTSYSLNKYGENISYLRLSLLHCKEALKTRFDFGFNVKVYEKLEKLESSLQFELKRNERDNDFIHLQPEIPVGSFPLLDTVTMVQSITPDVLTDKTAAYPYFSTCLDKEFMDLIEEHEKNILDAAVKSIDCLTKEGTEKLFALMEEIKSVNDNRYITETSNKVMENFTEIKNLGGLEFLRSEASSLDCLIDKVNGTYRHCCQALDEIINSVKSSQNMKEKGFYSDVIKLHEEVSLLKVNVENSQNAKDTIQKDISAFGKDIFELSAQSERILSNLAEKKNPNTDQLLLQANSYLAQWDLLKDERNMLKKLGSNDYFNISMYSNHTDIHSLLKCFREAVDAKWNFRRQRERQEIIIQNVEKLKSYLNSFKVQAECSEISKILSFSQETEKKYKFLLQTVRNETEIARELYNIICRAEERYSQYENRYENENRLNKIKLQHSSSNAFNPEIHKIKFKSSKK

SEQ ID NO: 9897 - protein, 766 aa, Gracilaria gracilis
MGSEDPHYVAWKDNKDGTACIRDDRYLEPFADALRYRYSKYSEILSAIESSEKSLENFSRGYETMGIHRVEGGVRYREWAPSAREMYFFGEFNNWDRNALPMERDEFGIWSCFIPEAEPGVSPIKHGSKVKAAVVPHQGPWLDRNPAWATFCVQDTKTFLYDTVFWDPPEKFKWTAPDHVKCPDSLRIYECHVGMGSNDLKVGSYREFADNVLPRIKETGYTALQIMAIMEHAYYASFGYHVTNFFAISSRCGIPEDLKYLIDKAHQLGLYVFMDVVHSHASSNSMDGINNFDGTDHQYFHEGERGRHSLWDSRLFNYGHWEVLRFLLSNLRWYMEEYHFDGFRFDGVTSMLYLHSGIGVQFTGNYSEYFGFQVDVDACVYMMLANKLVHDLYPDVAVTIAEDVSGMPTLCVPVDRGGLGFDYRLAMAIPDMWIEVLEKEKDENWNMGNIVFTLTNRRWNEKSIGYCESHDQALVGDKTIAFWLMDAAMYTDMSCNGYPSPAVERGIALHKMIRLLTMCLSGEGYLTFMGNEFGHPEWVDFPREGNGNSYQHARRRWDLCDNESLRYKHLYEFEKIIHALDNAHPFCRFQAHQYIVLQHEGDKLIVVEKGDRLLFVFNFHHSQSYSDYRIGTYWGGRYKLVLDSDGMNTGGHGRVHWDVVHTTRTEQWHNRPYYLQVYIPARTCQVYHCFETWEEEKEKGEKDKQTAKKSEGVVDDTKEKAGGDEKANTRVEEVSAVAAKIDEAVHLNGSQKASAKRQEKVVAGKA

SEQ ID NO: 9898 - protein, 364 aa, Zea mays
MRRWFCCTRFNASYREHENERPITPEEKEGNGFSVKSDPIKAPPSIEVPELSFEELKEKTDNFGSKALIGEGSYGRVYYAILDSGKHVAVKKLDASTDPELDNEFLTQVSIASKLKHDNFVEMLGYCVEGNQRLVVYEFATMGSLHDILHGRKGVPGAQPGPALDWMQRVKIAIDAAKGLEYLHEKVQPSIVHRDIRSSNILLFEDYRAKIADFNLSNQSPDMAARLHSTRVLGTFGYHAPEYAMAGQLTQKSDVYSFGVVLLELLTGRKPVDHTMPRGQQSLVTWATPRLTEDTVKQCVDPRLKGEYPPKGVAKLAAVAALCVQYESEFRPSMSIVVKALSPLLQHKPQPPAATTDATAPSDA

SEQ ID NO: 9899 - protein, 524 aa, Burkholderia mallei ATCC 23344
MRMKLKNIGLIAAGLATGVFATLQISASAQQAVTTAAAPLPLDQLRLFAEVFGQIKREYVEPVDDKKLLTAAIKGMVSSLDPHSSYLDKTDYQELQEQTKGRFAGLGIEISQEDGLVKVISPIEDTPAFRAGIRPGDLITRINDRPVRGMTLDKAVKQMRGEPGTKVTLTIFRKSDDRTFPVTVTRAVIRVQSVKMKLLDPGYAYIRITSFQERTTPDLAAKLQDIARQQPNLKGLILDLRNNGGGLLQSAVGVAGAFLPPDSVVVSTNGQIPDSKQIYRDNYENYRLPSFDSDPLKNLPAVFKTVPMIVLTNAYSASASEIVAGALQDSHRAVIMGKATFGKGSVQTVRPMTADSALRLTTAYYYTPSGRSIQNKGILPDIPVDQYADGDPDDVLVTREVDYTNHLANTQDPNEKKELEEREQRRMEQLRILEEQNDKKTPEQRQKDRERKPIEFGSADDFMMQQALNKLEGKPVEQSKMIAADSTAKSAAAKAGAASAAKGASGAAAKPASAAKPASAPQPQ

SEQ ID NO: 9900 - protein, 115 aa, Arabidopsis thaliana
MDPYKYRPSSAYNAPFYTTNGGAPVSNNISSLTIGERGPVLLEDYHLIEKVANFTRERIPERVVHARGISAKGFFEVTHDISNLTCADFVRAPGVQTPVIVRFSTVVHERASPET

SEQ ID NO: 9901 - protein, 493 aa, Vibrio sp. Ex25
MQTINVVWLKRDLRLTDHQPLTQALSSKHPTVLLYIVEPLLLNNPHYSERHWRFVWQSLQDMNETLKAYGHRITVLFGDALACFQSIQMQYQINAVFSHQEIGLNCTFERDKQIADWLHEQNITWFEFEHGAVIRGAKDRQGWDKHWDLVMRSSISPLDLQTNLLHSLDAESLGCAFSPPSSWLSKCKGMQTGGSQLAWKTLEDFFNRRGRDYYRSISSPTASRTACTRLSPYLAWGNISLREVYQYLLKHWQVVGFRRSLIALSSRLHWHCHFIQKFESEYDMEFYCVNRAYESLIKQSSTFDEEKLAAWKSGYTGIPLIDACMRCLHQTGYINFRMRAMLVSFLTHHMNMDWRTGVTHLAQLFLDFEPGIHYPQFQMQAGVTGTNTIRIYNPVKQAQEHDPDGAFIYKWVPELQMVPTPLLFEPWTMTQMETVMYHLKPDSRYLAPIVDLNSAAKDARERLWAWRKRADVKQEGKRILTRHVRPSKESRAR

SEQ ID NO: 9902 - protein, 643 aa, Desulfovibrio gigas
MCGIAGFVLLQDAPPVTDHQARDVLAAMAGRIAHRGPDGRGHHVGLPAAFAHCRLAIIDLSTGAQPMAAEDGAAVVTFNGEIYNYQEVRRELQALGRTFQTRSDTEVLLQAYLEWGVACLDRLEGMFAFALWDVRRRTLFAARDRFGKKPFFYTIQQGVFAFASELSALEAVPWAAFSIRASTLARFLAYEYVPTPESIYAEARKLPPAQYLELHEDGTLLVERYWETPMPRPEGSKGFGRADEPALCEELRRLLTQAVRRRLIADVPVGVFLSGGVDSSSVAAMAGQLAPGIKTFSIGFTEASYDESAYAGRVAAQLGTDHQLELLSADACADLLPEVVSRFDEPMADPSIVPTYLLSQITRRQVTVALGGDGPDELLAGYEYYPGFKATQYWERLPAWLRRAAVAASGLLPGSAGYVNPRHVAQTFLAAAEAPAWLRTQRMLTALTPEAQRALWKSPGDMLEPTRLFASTKRLWEALPDWPPMARVFHLFAQQITYGYILVKVDRCTMLHGLEARAPFLDRDLAEFCFRLPVSMKLRGATRKYLLKEAMAGLLPQDILHRPKRGFLIPTAAWLRGRLRPLVDDLLHERRLREQGLFHPAAVRRLVEEHASGKKDHRKGLWTMLVLQLWLAGKPAVRIDPER

SEQ ID NO: 9903 - protein, 139 aa, Rubrobacter xylanophilus DSM 9941
MPAAFIHTCYRITDPERTIDFYVNKLGMKKVGEMHFSDATNYFFAMEEDPSSPMLELTHNHDRTGPYEKGEGYSHIAFTVDDLEGTVARLAEQGVKVAVEPKTLTVDGHDYRIAFVEDPDGYRVELVQRGTMKVGDMLQ

SEQ ID NO: 9904 - protein, 444 aa, Aspergillus parasiticus
MARAGQAVDPSPLGQPLEFHFARRSAPNRFLKAGMSERMCSWTEENPSARGIPSRELIETYRTWGRGNIGAIVTGNVMIDPNHIEAEGNPTIPPNALFSGERFDQFANLAAAARANGSLILAQISHPGRQTPSHRQPEPISASDVPLDTENMGNTFAVPRAATENEIKNIITGFAHAAEFLDRAGYDGVELHAAHGYLLNQFLSRATNLRTDKYGGTLTNRMRLILEIRAAITEKVRPGFIVGIKINSVEFQPNGIVPDEACELCCALEEHRFDFVELSGGKYKNLEEDDNAKHIISKRHEAFFLDVAQKVVSSLTKMKSYLTGGFRSTAGMVDGLQTVDGIGLARPFCQEPYLCHDILRGKIPGAIIPVMDQLNYQLTVAAACIQMRQIGNKVQPVDLSSQDAVDAITAAAEGWLKRKAIDRSEEAFKPPLLSGDAAPLSVEA

SEQ ID NO: 9905 - protein, 547 aa, Candidatus Blochmannia floridanus
MAAKDVKFGNDARVKMLRGVNVLADAVKVTLGPKGRNVVLDKSFGAPVITKDGVSVAREIELEDKFENMGAQMVKEVASKANDSAGDGTTTATVLAQSIVNEGLKAVAAGMNPMDLKRGIDKAVVAAVEELKKLSVPCSDPKAIAQVGTISANSDETVGKLIAQAMDKVGKEGVITVEEGSGLQDELDVVEGMQFDRGYLSPYFVNKPESGTVELEHPFILLADKKISNIREMLPILESVAKSGKPLLIIAEDVEGEALATLVVNNMRGIVKVTAVKAPGFGDRRKAMLQDIAILTSGTVISEEIGLELEKATLEDMGQAKRVLITKDATTIIDGVGNKSSIDSRVAQINQQRDEATSDYDREKLQERVAKLAGGVAVIKVGAATEVEMKEKKARVEDALHATRAAVEEGVVAGGGVALIRVANAIRNLCGDNEDQNVGIKVARRAMEAPLRQIMANAGEEPSVIANNVRSGEGNTGYNAATEKYGNMIELGILDPTKVTRSALQYAASIAGLMITTECMVTELPKEDKPDLGGGNPGGAGGMGGMM

SEQ ID NO: 9906 - protein, 634 aa, Zea mays
MDGCDCIEPLWPTDDLLVKYQYISDFFIALAYFSIPLELIYFVKKSSFFPYRWVLIQFGAFIVLCGATHLINLWTFTTHTKTVAMVMTIAKVSTAVVSCATALMLVHIIPDLLSVKTRELFLKNKAEELDREMGLIRTQEETGRHVRMLTHEIRSTLDRHMILKTTLVELGRTLGLEECALWMPSRSGSSLQLSHTLHHQITVGSSVPINLPVINQVFSSNRAIIIPHTSPLARIRPLTGRYVPPEVAAVRVPLLHLSNFQINDWPELSAKSFAIMVLMLPSDSARKWHVHELELVEVVADQVAVALSHAAILEESMRARDLLMEQNVALDLARREAEMAIRARNDFLAVMNHEMRTPMNAIIALSSLLLETELTPEQRLMVETVLKSSNLLATLINDVLDLSKLEDGSLELEIKAFNLHAVFKEVMGFIKPIASIKRLSVSVMLAPDLPLCAIGDEKRLMQTILNISGNAVKFTKEGHITLVASIVKADSLREFRTPEFHPTASDDHFYLKVQVKDTGCGIGPQDLPHVFTKFAHPQSGGNRGFNGSGLGLAICKRFVSLMGGHIWIDSEGTGRGCTATFVVKLGVCDNTNTYQQQLIPLVWPSSADSDLRAPKPLPDGRGSTPLKSRYQRSV

SEQ ID NO: 9907 - protein, 158 aa, Zea mays
MSLIRRSNVFDPFSLDLWDPFEGFPFGSGNSSSLFHSFPRTSSETAAFAGARIDWKETPEAHVFKADVPGLKKEEVKVEVEDGNVLQISGERNKEQEEKTDTWHRVERSSGRFLRRFRLPENAKTEQITAAMENGVLTVTVPKEDAKKPEVKSIQISG

SEQ ID NO: 9908 - protein, 148 aa, Debaryomyces hansenii CBS767
MCCCECLSDICLIVVSVFFPPLPVWIRRGLCTCDSLINILLCMLGYFPGLIHSWYIIAKYPPYAISHESKVYYVYQTRPDLENQYGGGTSRTSRDSRNPLHHHHHHHHHHREPVDNEPLPIANPTYGSTSDRNDRNETSPPAYSEIGK

SEQ ID NO: 9909 - protein, 134 aa, Zea mays
MRKHRIVSLVAALLILLALAVSSNRNAQEDSMADNTGTLVGGIQDVPENENDLHLQELARFAVDEHNKKANALLGFEKLVKAKTQVVAGTMYYLTIEVKDGEVKKLYEAKVWEKPWEKFKELQEFKPVEEGASA

SEQ ID NO: 9910 - protein, 135 aa, Coix lacryma-jobi
MRKQRIVPLVAALLVLLALAVSSTRNAREEESMADDAGMLAGGIKDVPANENDLHLQELARFAVDEHNKKANALLGYEKLVKAKTQVVAGTMYYLTIEVKDGEVKKLYEAKVWEKPWENFKELLEFKPVEEDASA

SEQ ID NO: 9911 - protein, 489 aa, Nicotiana tabacum
SKFRPSSAYDSPFLTTNAGGPVYNNVSSLTVGPRGPVLLEDYHLIEKLATFDRERIPERVVHARGASAKGFFEVTHDISHLTCADFLRAPGVQTPVICRFSTVVHERGSPESLRDIRGFAVKFYTREGNFDLVGNNVPVFFNRDAKSFPDTIRALKPNPKSHIQEYWRILDFFSFLPESLHTFAWFFDDVCLPTDYRHMEGYGVHAYQLINKAGKAHYVKFHWKPTCGVKCMSEEEAIRVGGTNHSHATKDLYDSIAAGNYPEWKLFIQIMDTEDVDKFDFDPLDVTKTWPEDILPLMPVGRLVLNRNIDNFFAENEQLAFNPGHIVPGLYYSEDKLLQTRIFAYADTQRHRIGPNYMQLPVNAPKCAHHNNHRDGAMNFMHRDEEVDYLPSRFDPCRHAEQYPIPSRVLTGRREMCVIEKENNFKQAGERYRSWEPDRQDRYVSKWVEHLSDPRVTYEIRSIWICSLSQADKSCGQKVASRLTLKPTM

SEQ ID NO: 9912 - protein, 378 aa, Shewanella oneidensis MR-1
MSVFTAYESGALTLQNRIVMAPMTRARTTQPGNIPNDLMVQYYAQRSSAGLIITEATQISNDSQGYSFTPGVYTEAQIDGWKKVTAAVHEAGGKIFNQIWHVGRVSHPIFQQGNAPIAPSAIAPVGTKVWIVDEAHPEGQMVDCPEPREMTQADIDRVVADFAKAGANAIAAGFDGIEIHGGNGYLIDQFLRTNSNHRTDAYGGSPEKRIRFLLEVVEAVSAQIGADKVGVRLAPYVTFKDMACPEIVETILLAAKQLSAFGVAYLHLSEADWDDAPQIPESFRIELRNVFKGSIIVAGRYDVERANDVIEKGYADLVAFGRAFIANPDLPYRLANQLPLSPFDKGPLFGGSAAGYTDYPSYQAALRAVIRSSDDEVA

SEQ ID NO: 9913 - protein, 635 aa, Gibberella zeae PH-1
MLGRSNSDINLILSLRVLQSSLRSQLQTPRNTAFLSLAKFTTMPSKRLKRESSSPSAGGTAKKAKTSKMNGSGSSDALRRPHHKAQEAEENGIAIRKFYPAEMSNARARAYNNNEIPRPIEDLVDALEVTAKERKSIDVKDAVVHWFKMDLRISDNRALALASDKAKEAGVPLIALYIISPQDYEAHLRAPVRIDFMLRTLSVIKEDLAKLDIPLYVETVEKRKHLPDRILELMDEWGASHLYANMEYEVDELRREAAMIKDFAENGKAFEVVHDTCIVPPGELHTGAGKQYAVYTPWFKTWIAHIHENLDLLELYEPPEKNPDSARKKFKKLFNAEIPEAPKSKRLGDEEKERLRSLWPCGEHEAKKRLDKFCEERIGNYHEKRNIPADAATSSLSVHLASGTISARTCVRTARDRNKTKKLNGGNDGIQTWISEVAWRDFYKHVLVNWPYVCMNKPFKPEYSNISWSYDNDHFAAWCEGRTGFPIVDAAMRQMNTIGYMHNRCRMIVASFLAKDLLLDWRKGEKYFMEHLVDGDFASNNGGWGFSASVGVDPQPYFRIFNPLLQSEKFDPDGDYIRKWVPELKDLDNKAIHDPYNRKAGPQAKKKGYPEPIVTHKDCRERALAAYKEGLAIDE

SEQ ID NO: 9914 - protein, 486 aa, Oryza sativa
MGRRSGGRKLPFFASNASTSSSTKRTRSARRLPSLTRPRASSSPSPASPSPPPPSASHPAPPSPPLAVSPAGAGKVGKKKAGARLWMRLDRWGVSETLHLDKGSIIRRAGLPPRDLRILGPVFSDSSSILAREKAMVINLEFIRAIVTADEILLLDPLTIDVIPFVEQLTHHLPLKNLVCGNGQPGGDDHGEKHDDSHGDQVPRLNEATGAEHELPFEFQVLELALETVCSSFDVNVSGLERRATPVLEELTKNVSTRNLDRVRTLKSDLTRLLAHVQKVRDEIEHLLDDNEDMAHLYLTRKQLQNQQVEALISSAASNSIVPGGTSLSRLNNSFRRSVSIATSMHLDNDVEDLEMLLEAYFMQLDGIRNRILSVREYIDDTEDYVNIQLDNQRNELIQLQLTLTIASFGIAVNTFIAGAFAMNIQSKLYSIDDGSFFWPFVGGTSSGCFMICIVLLWGSNHPEAAVCLLCREIADESLNFMDNTE

SEQ ID NO: 9915 - protein, 142 aa, Arabidopsis thaliana
  misc_feature (89)..(89): Xaa can be any naturally occurring amino acid
  misc_feature (97)..(97): Xaa can be any naturally occurring amino acid
  misc_feature (101)..(102): Xaa can be any naturally occurring amino acid
  misc_feature (107)..(107): Xaa can be any naturally occurring amino acid
  misc_feature (111)..(111): Xaa can be any naturally occurring amino acid
  misc_feature (115)..(115): Xaa can be any naturally occurring amino acid
  misc_feature (117)..(117): Xaa can be any naturally occurring amino acid
  misc_feature (123)..(123): Xaa can be any naturally occurring amino acid
  misc_feature (125)..(126): Xaa can be any naturally occurring amino acid
  misc_feature (133)..(135): Xaa can be any naturally occurring amino acid
  misc_feature (137)..(137): Xaa can be any naturally occurring amino acid
  misc_feature (139)..(140): Xaa can be any naturally occurring amino acid
MASSMLSSTAVVTSPAQATMVAPFTGLKSSASFPVTRKANNDITSITSNGGRVSCMKVWPPIGKKKFETLSYLPDLSDVELAKEVDYLXRNKWIPCXFDSXXEHGIXCNRXHGNXPXYYDGRXWXXLEVSIFXXXTXSXXSF

SEQ ID NO: 9916 - protein, 474 aa, Triticum aestivum
MYHHHLQQQQQQRGESEAAASVDQDSSMSNLTTSASASANPPPPPTPASNKRKRSLPGNPDPESEVVALSPATLMATNRFLCEICGKGFQRDQNLQLHRRGHNLPWKLKQRGSKEVVRKKVYICPEASCVHHDPSRALGDLTGIKKHFFRKHGEKKWKCDKCSKKYAVQSDWKAHSKICGTREYKCDCGTVFSRRDSFITHRAFCDALTEESNKAISGGGLPLPPIAHAQHHAMLYSPHDLMQQQQHQELAAFQDHHHHHQVMQQHCNFDVKPEMQPWPTMPYDDVHHPLLQPLCSATAQSSATSVPTPTQQQQLPAAAAHLSATALLQKAAQMGATIGGAGAGGAGVHYTQMAGSATSATGSATFGLGLSCLSNQQMMSLARTASQGRSGEEGGASGGANDGMTRDFLGLRAFSHRDILGLAGFDSSCMGTAVNTGSNNTNMAPCYEPQQQGQPQPQQQQSSNEPWHGMGSHA

SEQ ID NO: 9917 - protein, 189 aa, Methylobacillus flagellatus KT
MDIDFKKLAPWNWFKKEQEEQQSTVSLPVQRNDLPVAGGPVSPILQLHREIDRLFDDAFRGFGFPTLAMPRWPSEWPGLLKPALDIQETDKQYKISLEVPGVEEKDIQITLDNDVLLVRGEKRQEQESKDGGFHRVERSYGSFQRALNLPADANQDTIKAAFKNGVLTITMEKREASTPKQGRSIPING

SEQ ID NO: 9918 - protein, 102 aa, Kluyveromyces lactis
GSRRASVGSMARPAFVNKLWSMVNDKSNEKFIHWSTSGESIVVPNRERFVQEVLPKYFKHSNFASFVRQLNMYGWHKVQDVKSGSMLSNNDSRWEFENERHA

SEQ ID NO: 9919 - protein, 623 aa, Streptomyces collinus
MSGIAGWVDFERDLTPEAPTVRAMAAALAHRGPDGFGEWIEGHAALAHRRLSLIGSEHAGQPAIVESEAGSPVAVLTLDGSVTNAVELRRELAAKGHRFTGDGDAEVALHAYLEWGAAFPERLEGLFALAVWDVRRQELLLVRDRLGVKPLCYFLTPSGVVFGSEPKALLAHPAVRPVVDADGLRELFAHSRKPGTGVFRGTREVLPGHTMTVRAPGTGHRRYWSLPARPHTDSLETTVATVRRLLSEAVATHLRADVPVGAMLSGGIDSSALTALAAHRRRAEGAGLRSFSVNFSGYAENFEPHPTMRATPDAPYAALAAEHIGTEHTEILLDTAALADPGTHAAALRSQDAPSPLGDMDVSLLLFFEALRGAGITAVLSGETADEVFNGYFWAYDPGHSNSTTFPWVSFERGHDAAAGGLGCSLVDRTLRKELDFMDYADQHYRDALTEVPQVAGESPAERRAREVTYLALTRWAPTHLDRADRMSMAHGVQLRPPFCDRALVEYVYNVPAELKRVNGQEKSLLRAAVADLLPERVLNRPKSAYPTVQEAAYGEFVRHRFEDVAADRTAPVAPLLDAEATRVALGAAAAPSGAFAWVERASMEMVLQLNTWLSEYGVELRV

SEQ ID NO: 9920 - protein, 467 aa, Listeria monocytogenes EGD-e
MTSVMWFRRDLRVNDNKALYHACKEDDLLLLFQVNPAQFITGSPSHQAFFASVAHFKQEVDKTALLQIMFGEPVECLKQLKETLPSWDKVYFNRDETGYGAERDEAAKTFFDEQEIEVQAFHDSYLHSAEEVKKSPTEYYKIFTPYYKKWREEIKETPFKVTLKADNIRKENLFPKYEEQFAEMTCDLPILDSGEKTANTRLANFIKHDVADYDKARDFPELDKTSHLSRYLRTGEISVRTIWQALQENEATEGRAIFEKELCWRDFYNMIYVSFPNQKNEPIQENYRFIEWENNREFFKAWQEGKTGFPLVDAAMRQLKETGWMHNRLRMVTASFLTKDLLIDWRFGEKYFQQMLIDYDPASNIGGWQWAASTGTDAVPYFRIFNPTTQSQKFDPTGKFIRKYVKELANLPDKFIHQPEKMSEIEQKEYGLLLGKDYPFPLIDHKERRKLAIARYEFSKEHYRGNI

SEQ ID NO: 9921 - protein, 315 aa, Arabidopsis thaliana
MADEIGFFQLNTGAKIPSVGLGTWQAAPGVVGDAVAAAVKIGYQHIDCASRYGNEIEIGKVLKKLFDDGVVKREKLFITSKIWLTDLDPPDVQDALNRTLQDLQLDYVDLYLMHWPVRLKKGTVDFKPENIMPIDIPSTWKAMEALVDSGKARAIGVSNFSTKKLSDLVEAARVPPAVNQVECHPSWQQHKLHEFCKSKGIHLSGYSPLGSPGTTWVKADVLKSPVIEMIAKEIGKSPAQTALRWGLQMGHSILPKSTNEGRIRENFDVLGWSIPKEMFDKFSKIEQARLVQGTSFVHETLSPYKTLEELWDGEI

SEQ ID NO: 9922 - protein, 225 aa, Vitis vinifera
MGRGKIEIKRIENTTNRQVTFCKRRNGLLKKAYELSVLCDAEVALIVFSSRGRLYEYANNSVRTTIERYKKVCSDSSNTGSVSEANAQFYQQEASKLRRQIRDIQNLNRHILGEALSSLNFKELKNLETRLEKGISRIRSKKNELLFAEIEYMQKREIELQNSNLFLRAQIAENERAQQQMNLMPGSQYESVPQQPYDSQNLLPVNLLDPNHHYSRHDQTALQLV

SEQ ID NO: 9923 - protein, 464 aa, Arabidopsis thaliana
MRNLSFIVLFLLTLFFIHHLVDASLLVKSLPGFEGPLPFELETGYVSIGESGDVELFYYFVKSERNPENDPLMIWLTGGPGCSSICGLLFANGPLAFKGDEYNGTVPPLELTSFSWTKVANILYLEAPAGSGYSYAKTRRAFESSDTKQMHQIDQFLRSWFVKHPEFISNPFYVGGDSYSGKIVPGAVQQILLGNEKGLTPLINIQGYVLGNPVTDKNIETNYRVPFAHGMGLISDELFESLERSCGGKFFNVDPSNARCSNNLQAYDHCMSEIYSEHILLRNCKVDYVLADTPNIRTDRRRVMKEFSVNDSSSLPPPSCFTYRYFLSAFWANDENVRRALGVKKVGKWNRCNSQNIPYTFEIFNAVPYHVNNSLKGFRSLIYSGDHDSMVPFSSTQAWIRALNYSIVDDWRPWMMSSNQVAGYTRTYANKMTFATIKGGGHTAEYTPDQCSLMFRRWIDGEPL

SEQ ID NO: 9924 - protein, 544 aa, Porphyromonas gingivalis W83
MKRSSGSGSTLSYILIAAIFSAVGALASHFYFTHKNPSDLNEVLNLIDRNYVDSVDVRKLQHNMIPYLLEQLDPHSVFLSKADNAEEAATLSGGFCGIGVSFNTLLDTIVVTQIVPGGPSDRAGIRAGDRLLQAGSQKLYGKGVDMNTIDDVLRGEKGSVVNILIRRNGKESVHRVVRDDVPLPSLNAFYLIEPSIAYVRIDSWTGTTHAEFIEALGRLRKKGATSLILDLRENRGGLLEPAIAMANEFLGKNLPILQIEGKAYPREEISSDGKGILQQIPLVVLVDEFSASSSEVFTGAMQDHDRAQIIGRRTFGKGLVQLPFDLADGSAIRLTVARYYTPSGRSIQKPYSSGVDENYYQDLRNRFNHGELYSADSIPSLGGKIFKTAGGREVYGGGGIIPDIFIPLDTAGLNSYMMKVEDSDLIPRYAFLYSDANRVSLSRFKTVEELGAYLDRTYLIFDFASFAQRYGIPMRTSLINEARNRIKKYINAYIAMNFFDLQGYYQLLLHDDPFILQAISLIKEGKTFPLIYDQKGTQSTDPAA

SEQ ID NO: 9925 - protein, 200 aa, Oryza sativa
MVTNMTHDDYVSLCLMALAQAGVGGQWPAQKQQIDMAPPAPERELLRFRCSVCGKAFPSHQALGGHKASHRKPPTAALPMHVIDAPPPPSAEDTASSSTTTTTSGGGRHRCSVCHRTFATGQALGGHKRCHYWDGLSVVSVTASASGSGSSSVRNFDLNLKPVPETVAAGVRRWGEEEEVQSPLPFKKRRLSSPSLELNL

SEQ ID NO: 9926 - protein, 207 aa, Triticum aestivum
  misc_feature (163)..(163): Xaa can be any naturally occurring amino acid
  misc_feature (174)..(174): Xaa can be any naturally occurring amino acid
  misc_feature (192)..(192): Xaa can be any naturally occurring amino acid
MASRRRTLLKVIILGDSGVGKTSLMNQYVNKKFSNQYKATIGADFLTKEVQFEDRLFTLQIWDTAGQERFQSLGVAFYRGADCCVLVYDVNSMKSFDNLNNWREEFLIQASPSDPDNFPFVLLGNKVDVDGGNSRVVSEKKAKAWCASKGNIPYFETSAQDGXHVEEAFQCIVXNALKNEPEEELYMPDTVXDVVGGHRGQGSSGCC

SEQ ID NO: 9927 - protein, 586 aa, Brassica oleracea
MCGILAVLGCSDDSQAKRVRVLELSRRLRHRGPDWSGIYQNGFNYLAHQRLAIIDPDSGDQPLFNEDKSIVVTVNGEIYNHEELRKGLKNHKFHTGSDCDVIAHLYEEHGENFVDMLDGIFSFVLLDTRDNSFMVARDAVGVTSLYIGWGLDGSLWVSSEMKGLHEDCEHFEAFPPGHLYSSKSGGGFKQWYNPPWFNESVPSTPYEPLAIRSAFEDAVIKRLMTDVPFGVLLSGGLDSSLVASITARHLAGTKAAKRWGPQLHSFCVGLEGSPDLKAGKEVAEYLGTVHHEFHFTVQDGIDAIEDVIYHVETYDVTTIRASTPMFLMSRKIKSLGVKMVLSGEGSDEIFGGYLYFHKAPNKQEFHQETCRKIKALHKYDCLRANKATSAFGLEARVPFLDKEFINTAMSLDPESKMIKPEEGRIEKWVLRRAFDDEERPYLPKHILYRQKEQFSDGVGYSWIDGLKAHAAENVNDKMMSKAAFIFPHNTPLTKEAYYYRMIFERFFPQNSARLTVPGGATVACSTAKAVEWDASWSNNMDPSGRAAIGVHLSAYDGSKVALPLPAPHKAIDDIPMMMGQEVVIQT

SEQ ID NO: 9928 - protein, 548 aa, Legionella pneumophila str. Paris
MAKELRFGDDARLQMLAGVNALADAVQVTMGPRGRNVVLEKSYGAPTVTKDGVSVAKEIEFEHRFMNMGAQMVKEVASKTSDTAGDGTTTATVLARSILVEGHKAVAAGMNPMDLKRGIDKAVLAVTKKLQAMSKPCKDSKAIAQVGTISANSDEAIGAIIAEAMEKVGKEGVITVEDGNGLENELSVVEGMQFDRGYISPYFINNQQNMSCELEHPFILLVDKKVSSIREMLSVLEGVAKSGRPLLIIAEDVEGEALATLVVNNMRGIVKVCAVKAPGFGDRRKAMLQDIAILTKGQVISEEIGKSLEGATLEDLGSAKRIVVTKENTTIIDGEGKATEINARIAQIRAQMEETTSDYDREKLQERVAKLAGGVAVIKVGAATEVEMKEKKARVEDALHATRAAVEEGIVAGGGVALIRAQKALDSLKGDNDDQNMGINILRRAIESPMRQIVTNAGYEASVVVNKVAEHKDNYGFNAATGEYGDMVEMGILDPTKVTRMALQNAASVASLMLTTECMVADLPKKEEGVGAGDMGGMGGMGGMGGMM

SEQ ID NO: 9929 - protein, 155 aa, Arabidopsis thaliana
MDLGRFPIISILEDMLEVPEDHNNEKTRNNPSRVYMRDAKAMAATPADVIEHPNAYAFVVDMPGIKGDEIKVQVENDNVLVVSGERQRENKENEGVKYVRMERRMGKFMRKFQLPENADLDKISAVCHDGVLKVTVQKLPPPEPKKPKTIQVQVA

SEQ ID NO: 9930 - protein, 506 aa, Aspergillus nidulans FGSC A4
MSATKAESQKIFEKLKTKPANKTDPVFAEITQICFDCGSKNPTWSSVPFGIYLCLDCSANHRNLGVHISFVRSTNLDQWQWEQLRIMKVGGNESATKYFQSNGGSAALASKDVKVKYTSNAAVKYKEELKRRAALDAQEYPEEVVITDVPAGATSNGSSTPAGDDDDFFSSWDKPSIKRPSNPPSRTGTPPVVSRTSSPFLNAGANTARSKSPLSSDKESATASPAPTAIRASAAARKTSGTTTAKKGSVLGTKKAPKLGAKKIGGADLIDFEEAERKAKEEAERIEKLGYDPEAEEAEAAKTKTSGTGATAIASPTPLSPNKVGFGATKTTHERNSSDVERLGMGIGRLGFGQTVGSKPTAPAPKKLGFGAVGAARSAEDEEELQRTKNKFGAQKGISSDEFFGRDRFDPVAQSEAKERLRQFDGAQAISSNSYFGRPEDDYPPVDDTYGDLEAAAKDFVRRFGITAGDDLENLTQLVGDGASKLQAKRVQEFLFHNDILSLRTR

SEQ ID NO: 9931 - protein, 366 aa, Solanum tuberosum
QMGLAENQLCFDLIQEWIVNNPKASICTYEGVQDFQDIAIFQDYHGLPEFRKAVARFMEKVRGDRVTFDPERIVMSGGATGAHESLAFCLADPGDAFLVPTPYYPGFDRDLRWRTGVQLFPVVCESSNNFKVTKEALEEAYKKAQESNIKVKGLLINNPSNPLGTILDKETLKDILRFINDKNIHLVCDEIYAATAFCQPSFISISEVMNEVVGCNDDLVHIVYSLSKDLGFPGFRVGIIYSYNDVVVNIARQMSSFGLVSTQTQRLIASMLSDTIFVENFIAKSAMKLSQRHDLFTKGLGQVGITTLKSNAGLFIWMDLRRFLENSTFDNELKLWHIIINKVKLNVSPGCSFHCSEPGWFRVCFA

SEQ ID NO: 9932 - protein, 234 aa, Lactuca sativa
MDHAADAFRTDLMTITRFVLNEQSKHPESRGDFSILLSHIVLGCKFVCSAVNKAGLAKLIGLAGETNVQGEEQKKLDVLSNEVFVKALVSSGRTCILVSEEDEDAIIVEPSKRGRYCVVFDPLDGSSNIDCGVSIGTIFGIYMIKDGDEAILEDVLQPGKNMVAAGYCMYGSSCTLVLSTGSGVNGFTLDPSLGEFILTHADIKIPKKGKIYSVNEGNAKNWDGPTAKFVEKCK

SEQ ID NO: 9933 - protein, 81 aa, Methylobacillus flagellatus KT
MRVSAENGVLTISGERKLEKEEQGKKFHRIERAYGRFVRSFVLPDNVDPTKVTASMKDGALEVRLVKAEQAKPKQIEISVN

SEQ ID NO: 9934 - protein, 321 aa, Parasitella parasitica
MAVDYLTLDRTGDKMPLRGFGCWKIEKKDAENTIYQAIKIGYRLFDGACDYGNEVEVGRGINKAIKEGLVKREELFIVTKLWNTFHSKQHVRTAFDRQLKDWGLEYFDLYLIHFPIPLQYVDPAVSYPPEWYVPHADKLNFERSPIHECWAEMEKLVQAKLTRNIGVANFNCQAILDLLSYSKIKPAVLQIEIHPLLPQERLVKWVQEQGIQVTAYSSFGPTSYVDLCESGKTYSSLLANADVKSIANKHNVNTGQILLRYALDRNIAVIPKSVHEDRMKSNLDILNIQLDQDDRKILNSLKTNQRFNDPMIFGFGLPLFD

SEQ ID NO: 9935 - protein, 458 aa, Rhodopseudomonas palustris CGA009
MMRKTSVILLSAVTGAALTLFVTQPRTMLMGATARAATSDTYRQLNLFGDVFERVRSDYVEKPDDSKLVESAISGMLAGLDPHSSYMDAKSFRDMQVQTRGEFGGLGIEVTMEDGLIKVVSPIDDTPASKAGILANDIITNLDDEAVQGLTLNQAVEKMRGPVNTKIRLKIVRKGQDNPIEVTLVRDNIRVRSVRARVEDSDIGYIRITTFNEQTTEGLKKEIANLTNQIGADKLKGFILDLRNNPGGLLEEAVTVSDAFLDRGEIVSTRGRNAEETQRRSAHAGDLTKGKPVIVLINGGSASASEIVAGALQDHKRATVVGTRSFGKGSVQTIIPLGSGNGALRLTTARYYTPSGKSIQAKGITPDIEVMQDVPADLKARTDTKGEASLRGHLKGADGDEKTGSQSYVPPEAKDDKALKAAADLLHGIKVNASAPADKQTTGDKAAIDKPAGNKAAN

SEQ ID NO: 9936 - protein, 363 aa, Glycine max
MRRWLCCTCQVEESYPSNENEHLKSPRNYGDGNQKGSKVSAPVKPETQKAPPPIEAPALSLDELKEKTDNFGSKALIGEGSYGRVYYATLNNGKAVAVKKLDVSSEPESNNEFLTQVSMVSRLKNGNFVELHGYCVEGNLRVLAYEFATMGSLHDILHGRKGVQGAQPGPTLDWIQRVRIAVDAARGLEYLHEKVQPPIIHRDIRSSNVLIFEDYKAKIADFNLSNQAPDMAARLHSTRVLGTFGYHAPEYAMTGQLTQKSDVYSFGVVLLELLTGRKPVDHTMPRGQQSLVTWATPRLSEDKVKQCVDPKLKGEYPPKGVAKLAAVAALCVQYEAEFRPNMSIVVKALQPLLKSPAPAAPES

SEQ ID NO: 9937 - protein, 713 aa, Caulobacter crescentus CB15
MARYQGVAGDLGAAIKIMAVPELDQEAARIRALLDLGILDTPPEQEFDDIVQAARDACQAPIAVLSLIDSDRQWFKARVGIEACETERDASFCAHAVAASKTLSIPDARLDARFKDNRLVNGPEQIRSYLGAPIMTREGVAIGAVAVIDQRPRDWSSGDTQALERLARIAARLIEMRARCELADAQGQQLLNLAAEGVQFRTIFAAMREGVVLQDRSSIILRHNPAAAALLGLTHDQLLGKSSVDDDWRIVDAAGAPLPVEAQPSMVCLATGEPVLNFVLGVHLRDGALRWLSVNSLPIFDKIGEPPNLTVTSFIDVTELRERETELRDALELAERASRVKSQFVANVSHEIRTPLNGVIALASALRQSALTDRQREMVEIIVESGTTLESILSALLDLAKIEAERMELEIVSFGLEDLVRSSTDLFKIKADNKGLGFDVSVIAPPGARYRGDAQKIRQILWNLLANAIKFTDAGEIAVSVTVEGADPAAQTLLIEVRDTGVGLSPEMEHVLFEPFIQGDASATRRFGGTGLGLTICRALARMMGGDIEALARAERGSVFRVHVPVSTAEPEASVAVESEADLATAMTILLVEDNPNNRRVVELLLEPTGAELVMAENGAEALTILATQRFDLILMDMQMPVMDGLTATREVRCLEAREGEGRTPTPIVMMTANASREHRDAAFAAGADGFITKPVTPATLYAGINTALTAAA

SEQ ID NO: 9938 - protein, 405 aa, Streptococcus mutans UA159
MMKEFNKSAKLEHVAYDIRGPVLEEADRMIANGEKILRLNTGNPAAFGLTAPDEVIRDLIMNARESEGYSDSKGIFSARKAIMQYCQLKNIPDVDVDDIYIGNGVSEMITMSMQGLLDDGDEVLVPMPDYPLWTAAVSLAGGQAVHYVCDESSNWYPDIDNIKSKITSNTKALVVINPNNPTGALYPKDVLEDIVEVARQNDLIIFADEIYDRLVMDGGEHVAIASLAPDLFCVSMNGLSKSHRIAGFRVGWMVLSGPKKHVKDYIEGLNMLSNMRLCSNVLAQQVIQTSLGGVQSIDELLLPGGRIYEQRNFIYKAMNEIPGITAVKPQAGLYIFPKIDRNMYRIDDDEQFVLNFLKQEKILLVHGRGFNWMEPDHFRIVYLPRVEELSKIQEKMTRFLGQYRK

SEQ ID NO: 9939 - protein, 371 aa, Zea mays
  misc_feature (362)..(362): Xaa can be any naturally occurring amino acid
MGSGGANTAPLLTPYKMGKFDVSHRVVLAPLTRQRSYGNVPQPHAILYYQQRATKGGLLIAEATGVSDTAQGYKDTPGIWTHEQVEAWKPIVDGVHQKGGIFFCQIWHVGRVSNSTFQPNGQAPISSTDKPLKPQVRANGIDVATFAVPRRLETDEIPLVVNDFRVAARNAIEAGFDGVEIHGAHGYLIDQFLKDGVNDRTDKYGGSLENRCRFALEVTQAVVDEIGADKVGIRLSPFASYSEAPDSDPEALGMYMANALNEFGILYCHMVEPRMVKLGEKFETPYSLRPIRDAFRGTFIVAGGYGREDGNRAISTGYADLVAFGRVFLANPDLPRRFEVDAPLNKYNRDTFYIPDPVIGYXDYPFLSSDV

SEQ ID NO: 9940 - protein, 259 aa, Pseudomonas syringae pv. phaseolicola 1448A
MIQIHALPAFNDNYIWLLQDLSSQQCAVVDPGDAKPVLGWLTEHPDYRLTDILITHHHNDHVGGVAELKQATRARVLGPAAETIPARDVALVDHDRLTVLGLEFVVHAVPGHTLGHIAFYHEDATTPLLFSGDTLFAAGCGRLFEGTPEQMHDSLERLAKLPDSTLIYCAHEYTLSNLRFAQAVEPDNQDIAQRLAEVIRWRSENRISLPSNLALEKRTNPFLRTRETSVKEKADERSSGQNTSQSAVFASLRAWKDKF

SEQ ID NO: 9941 - protein, 549 aa, Yersinia enterocolitica
MAAKDVKFGNDARIKIVRGVNILADAVKVTLGPKGRNVVLDKSFGSPTITKDGVSVAREIELEDKFENMGAQMVKEVASKANDAAGDGTTTATVLAQSIITEGLKAVAAGMNPMDLKRGIDKAVIAAVEELKKLSVPCSDSKAIAQVGTISANSDSTVGELIAQAMEKVGKEGVITVEEGSGLQDELDVVEGMQFDRGYLSPYFINKPETGSIELESPFILLADKKISNIREMLPVLEAVAKAGKPLLIIAEDVEGEALATLVVNTMRGIVKVAAVKAPGFGDRRKAMLQDIATLTAGTVISEEIGLELEKTTLEDLGQAKRVVINKDTTIIIDGVGDEAAIQGRLAQIRQQIEEATSDYDKEKLQERVAKLAGGVAVIKVGAATEVEMKEKKARVEDALDATRAAVEEGVVAGGGVALIRARSAITAAGLKGDNEDQNVGIKVALRAMESPLRQIVVNAGEEASVIANNVKRVQVATVTSYSEEYGDMIAMGILDPTKVTRSALQYAASIAGLMITTECMITDLPRDDKGADMGAGGMGGMGGMGGMM

SEQ ID NO: 9942 - protein, 738 aa, Passiflora edulis
MESCNCIEPQWPAEELLMKYQYISDFFIALAYFSIPLELIYFVKKSAVFPYRWVLVQFGAFIVLCGATHLINLWTFTMHSRTVATVMTIAKVLTAVVSCATALMLVHIIPDLLSVKTRELFLKNKAAELDREMGLIRTQEETGRHVRMLTHEIRSTLDRHTILRTTLVELGRTLALEECALWMPTRTGLELQLSYTLRQQNPVGYTVPIQLPVINQVFSTNRAVKISPNCPVARLRPLAGKYVPGEVVAVRVPLLHLNNFQINDWPELSTRRYALMVLMLPSDSARQWRVHELELVEVVADQVAVALSHAAILEESMRARDLLMEQNVALDLARREAETAIRARNDFLAVMNHEMRTPMHAVIALSSLLQETELTPEQRLMVETILKSSNLLATLINDVLDLSKLEDGSLQLDSGTFNLHAVFREVLNLIKPIASVKKLLLLLNLAPDLPEYAVGDEKRLIQIILNIVGNAMKFSKEGSISITAIVAKLESLRDARVPDFFPTPSENHFYLRVQVKDSGVGINPQDIPKLFIKFAQTQTTGARNSSGSGLGLAICRRFVNLMDGHIWLESEGLGKGCTAIFIVKLGIPERLNESKPPFMSKVAVDHGQTTFPGLKVLLMDDNGVSRMVTKGLLLHLGCDVTTVGSSEECIRVASQDHRVVFMDVGMPEGFEAAVRLHEKFTKRHERPLVVALTASTDRMTKENCMRVGMDGAILKPVSVDKMRSVLSDLLEHKVLFEC

SEQ ID NO: 9943 - protein, 239 aa, Brassica oleracea var. botrytis
RGRVQLKRIENKINRQVTFSKRRSGLLKKAHEISVLCDAEVALIVFSSKGKLFEYSTDSCMESILERYDRYLYSDKQLVGRDISQIENWVLEHAKLKARVEVLEKNKRNFMGEELESLSLKDLQSLEHQLDAAIKSIRSRKNQAMFESISALQKKDKALQDHNNTLLKKIKEREKKTGHQEGQLNHCSNNSSIVQPQYCLTSSRDGFVGRVGGENGGASSLTEPNSLLPAWMLRPTTNE

SEQ ID NO: 9944 - protein, 434 aa, Cytophaga hutchinsonii
MRNKILSDGAKELSYEIREIVKKADLINKNGQSIVFENIGDPIQKNNVVPQWIRETISNLTLDNKSYSYSPSKGILKTRQFLAELNNKKAGAQITADDILFFNGLGDAIAKVYQFISRSSRVIGPSPAYSTHSSAEAAHASQDPITYKLDPNNHWYPDLDDLYNKVKYNPNIIGILIINPDNPTGMVYPLETLKRIVEIAREFNLFLLSDEIYLNITYNGARAYSLAEVIEDVPGIAMKGISKEFPWPGSRCGWMEYYNRGKDQDFDKFCSALDNAKMIEVCSTTLPQLAIPVIMSDPRYLPYREELNSKIGKRSKIIAGILGQIPELMFNETYGAFYNTIVFKDGVLNDKQTLPIENAANKALVEKWISEPNVDLDKRFVYYLLAAKGICVVPISSFCSDLKGFRVTLLEENEELLEQTFTSIRDAIRLYLKS

SEQ ID NO: 9945 - protein, 296 aa, Pseudomonas putida
MAGKSPLINLNNGVKMPALGLGVFAASAEETASAIASAISSGYRLIDTARSYNNEAQVGEGIRNSGVDRAEMFVTTKLFNCDYGYERALRAFDESLGRLGLDYVDLYLLHWPTKDWNATIQSWKAAEKILGDGRARAIGVCNFLEDQLDELIAASDVVPAVNQIELHPYFAQKPLLAKNRALGIVTEAWSPIGGAINDGDGDNHGGRKHPLTDPVITTIAEAHGRSAAQVILRWHFQNDVVAIPKSVNPERIAKNIDVFDFALSDAEMAQLDELDTGVRIGPDPRDVDTSSFAEFV

SEQ ID NO: 9946 - protein, 635 aa, Oryza sativa (indica cultivar-group)
MDGSCDCIEPLWQADDLLVKYQYISDFFIALAYFSIPLELIYFVKKSAFFPYRWVLIQFGAFIVLCGATHLINLWTFAIYTKTIAVVLTVAKAATAVVSCITALMLVHIIPDLLNVKLRERFLKDKADELDREMGIIRTQEETGRHVHMLTHEIRSTLDRHTILRTTLVELGRTLALAECALWMPTRSGSALQLSHTIYNSAAIGSVVPINLPIVSKVFNSNRVVKIPHTSPLASITADKSRYVPPEVVAIRVPLLHLTNFQINDWPELSAKSFAVMVLMLPPDSAREWRPHERELVEVVADQVAVALSHAAILEESMRARDLLMEQNIALDAARREAEMAICACNDFLAVMNHEMRTPMRAIVSLSSLLLETNLSAEQRLMVETILKSSDLLATLTNDVLDVSKLENGSLELEIAPFNLHSTFTDVVNLIKPVAACKRLSVMVTLAPELPLHAIGDQKRLMQIILNVAGNSIKFTKEGHVSITASMARPHALRGPHEPDYHPVVSDGFLYLAVQVKDTGCGISPQDMPHTFRKFAHPENAGKWNSGSGLGLALSRRFVSLMEGNIWLESEGVGKGCTAMFFVKLGMPEKPNANLRRMAPHPLQPNQGAGGPDALSISIMDSNPRVPRVRYQSSV

SEQ ID NO: 9947 - protein, 241 aa, Brassica oleracea var. botrytis
MGRGRVQLKRIENKINRQVTFSKRRSGLLKKAHEISVLCDAEVALVIFSSKGKLFEYSTDSCMERILERYDRYLYSDKQLVGREISQSENWVLEHAKLKARVEVLEKNKRNFMGEDLDSLSLKELQSLEHQLHAAIKSIRSRKNQAMFESISALQKKDKALQDHNNALLKKIKEREKNTVQQGGQLIQCSNNASILQPQYCLTSSRDGFVGRVGEENGVASLLAEPNSLLPAWMLRPTTKE

SEQ ID NO: 9948 - protein, 501 aa, Sinapis alba
DEEITCQENLPFTCGNTDALNSSSFSSDFIFGVASSAYQIEGTIGRGLNIWDGFTHRYPNKSGPDHGNGDTTCDSFSYWQKDIDVLDELNATGYRFSIAWSRIIPRGKRSRGVNEKGIDYYHGLISGLIKKGITPFVTLFHWDLPQTLQDEYEGFLDPQIIDDFKDYADLCFEEFGDSVKYWLTINQLYSVPTRGYGSALDAPGRCSPTVDPSCYAGNSSTEPYIVAHHQLLAHAKVVDLYRKNYTHQGGKIGPTMITRWFLPYNDTDRHSIAATERMKEFFLGWFMGPLTNGTYPQIMIDTVGERLPSFSPEESNLVKGSYDFLGLNYYFTQYAQPSPNPVNSTNHTAMMDAGAKLTYINASGHYIGPLFEKDKADSTDNIYYYPKGIYSVMDYFKNKYYNPLIYVTENGISTPGDENRNQSMLDYTRIDYLCSHLCFLNKVIKEKDVNVKGYLAWALGDNYEFNKGFTVRFGLSYIDWNNVTDRDLKKSGQWYQSFISP

SEQ ID NO: 9949 - protein, 243 aa, Brassica oleracea var. botrytis
MGRGRVQLKRIENKINRQVTFSKRRSGLLKKAHEISVLCDAEVALVVFSSKDKLFEYSTDSSMERILERYDRYLYSDKQLVGRDISQSENWVLEHAKLKARVEVLEKNKRNFMGEDLDSLSLKELQSLEHQLDAAIKSIRSRKNQAMFESISALQKKDKALQDHNNTLLKKIKEKEKEKNTGQQEGQLIQCSNNSSVLQPQYCVTSSRDGLVERVGGENGGASSLIGPNSLLPAWMLRPATNE

SEQ ID NO: 9950 - protein, 437 aa, Corynebacterium efficiens YS-314
MTTKKRNTSETTDTAPKAVGADQAARPVRRTTRRIFDQSEKMKDVLYEIRGPVAAEAERMELDGHNILKLNTGNPAVFGFDAPDVIMRDMIAALPTSQGYSTSKGIIPARRAVVTRYEVIPDFPNFDVDDVFLGNGVSELITMTMQALLNDGDEVLIPAPDYPLWTAATSLSGGKPVHYLCDEDNEWNPSIEDIRSKITEKTKAIVVINPNNPTGAVYSRKVLQEIADIAREYDLLVLADEIYDRILYDDAQHINMATLCPDLMCITYNGLSKAYRVAGYRAGWMIITGPKRYAKGFIDGLELLAGTRLCPNVPAQHGIQVALGGRQSIYGLTGEGGRLLNQRNVAWQKLNEIPGVSCYKPMGALYAFPRLDPNVYEIHDDTQLMLDILRSEKILLVQGTGFNWPHHDHFRVVTLPWASQLENAIERLGNFLVSYKQ

SEQ ID NO: 9951 - protein, 242 aa, Brassica oleracea var. botrytis
MGRGRVQLKRIENKINRQVTFSKRRSGLLKKAHEISVLCDAEVALVVFSSKGKLFEYSTDSSMERILERYDRYLYSDKQLVGRDISQSENWVLEHAKLKARVEVLEKNKRNFMGEDLDSLSLKELQSLEHQLDAAIKSIRSRKNQAMFESISALQKKDKALQDHNNTLLKKIKEKEKEKNTGQQEGQLIQCSNNSSVLQPQYCVTSSRDGLVERVGGENGGTSSLIEPNSLLPAWMLRPTTK

SEQ ID NO: 9952 - protein, 227 aa, Nicotiana sylvestris
MAVKNKVSNGDLKGGNVKTNGVKEVHYRGVRKRPWGRYAAEIRDPGKKSRVWLGTFDTAEEAAKAYDTAAREFRGPKAKTNFPLPSENQSTSHSSTMESSSGETGIHAPPHAPLELDLTRRLGSVAADGGDNCRRSGEVGYPIFHQQPTVAVLPNGQPVLLFDSLWRPGVVNRPQPYHVMPMAMGFNGVNAGVDPTVSDSSSVVEENQYDGKRGIDLDLNLAPPTEF

SEQ ID NO: 9953 - protein, 473 aa, Exiguobacterium sp. 255-15
MKKSTTAVIAVSTFGLGLGAGAVGMLAAGGTDSVATSSSSNATGDWKKIDQVRQMISQNYLEDVTDQELLEGALTGMTEVLDDPYSVYMDESETASFNTNLSSSFEGIGATLEQKGESIVIVSPIKGSPAEKAGIKPGDIILEIDGKSTKGQKTDQAVKKIRGEKGTKVVLMIQRGGQDPMKISIVRDTIPIETVYSKTEKVNGKTIGVLQVTQFSDPTAKEFEKQLAALEEKNIDGLVIDVRGNPGGLLTAVSQMIAPFIPKDTPIFQVEDNKGERTQEFGKAEEKKPYKLVVLEDSGSASASEILAAGLKEGAGAEVVGTKSFGKGIVQSAYDLKDGSDLKLTTNKWLTPDGNWIHKKGVKPTVEVKQPDYFNVTKILTDNKTLASGDYGKPVENAHLVLEAIGFDPKGQDGYFGDTMKQAVERLQKDAKLEVTGKINQVTASEMETRLLKKLEDEKNDVQRIKALEVAAQ

SEQ ID NO: 9954 - protein, 400 aa, Arabidopsis thaliana
MTKKMRRVGKYEVGRTIGEGTFAKVKFARNTDTGDNVAIKIMAKSTILKNRMVDQIKREISIMKIVRHPNIVRLYEVCLFVSMHLRNFISEVLASPSKIYIVLEFVTGGELFDRIVRNFHTCRQRPLVHKGRLEESESRKYFQQLVDAVAHCHCKGVYHRDLKPENLLLDTNGNLKVSDFGLSALPQEGVELLRTTCGTPNYVAPEVLSGQGYDGSAADIWSCGVILFVILAGYLPFSETDLPGLYRKINAAEFSCPPWFSAEVKFLIHRILDPNPKTRIQIQGIKKDPWFRLNYVPIRAREEEEVNLDDIRAVFDGIEGSYVAENVERNDEGPLMMNAFEMITLSQGLNLSALFDRRQDFVKRQTRFVSRREPSEIIANIEAVANSMGFKSHTRNFKVT

SEQ ID NO: 9955 - protein, 277 aa, Synechococcus sp. PCC 7002
MTVATSQKLPLDWTTIIYFSLIHLVALLAFLPGNFSWQAVGVFLLFHWITGGIGITLGFHRLVSHRSFEVPKWLEYFLIFCGTLACQGGPIDWIGLHRIHHKHSDNTPDPHDSNKGFWWSHIGWMLFEIPARGDIDRYIKDIKDDPFYNFCQKYMVLIQVALGLALYAWGEAWVGNGWSFVIWGVFLRLAVVFHCTWFVNSATHKFGYKSHESNDHSKNCWWVALVTYGEGWHNNHHAYQYSARHGLNWWEIDMTWMTIRFLQALGLAKNIRLAPAK

SEQ ID NO: 9956 - protein, 477 aa, Bdellovibrio bacteriovorus HD100
MKKTLTTSAGIPISENQHSLTSGPRGPVALQDYHLIEKLAHFNRERIPERVVHAKGSGAYGTFTVTHDITRFTKAAIFSKIGKKTEAFLRFSTVAGEKGSADTERDPRGFALKFYTEEGNWDIVGNNTPVFFERDPLKFPDFIHSQKRDPQTGYKNPVRMWDYWSKAPEALHQITILFSDRGIPDGYRFMNGYGSHTFSFINDKNERVWVKFHFKSMQGIKNLPVAKAVELAGTDPDYAGRDLFEAIERKEFPRWALKVQIMTERQAEQFRFDPFDLTKVWPHSEFPLLDVGILELNRNPENYFAEVEQAAFSPSNVPPGVGFSPDKMLQGRLFAYPDAQRYRLGVNYQYLPVNRPHSEVNSYHRDGSMRFDGNGGRQDNYEPNGFGGPVQNESFKDPALNLSGTLDRHDSHKDNDDFTQAGNLYRMLSEEEKDRLTSNIAGTMKTISEDLQTKNIEHFKRCDPDYGGRIAAKLGLD

SEQ ID NO: 9957 - protein, 765 aa, Sclerotinia sclerotiorum
MNRYDDGELEISLAPSANHRAQHRSSEASSNPRRDSQNGGNRRMESAPQKKTEQRVGAYSVVRTLGEGSFGKVKLAVHRVTQQQVALKIIARRKLISRDMAGRVEREIEYLQLLRHPHIIKLYTVIKTPHEIIMVSEYAGNELFDYIVQHGKMREDEARRFFQQIICAVEYCHRHKIVHRDLKPENLLLDENLNVKIADFGLSNIMTDGNFLKTSCGSPNYAAPEVINGKLYAGPEVDVWSCGVILYVLLVGRLPFDDEHIPSLFAKIARGQYNVPSYMGREAAALIKKMLAVNPVYRATIAEIRDDPWFTTNLPAYLQPPVEEFIDTGVDPAKAINPRAIAPHASPAIQEKLHVQVTEKISKTMGYGIKDVQEALAAEEPSAIKDAYLIVRENKLMQANPNLTDDKNQLLFQIPSPPTYDSTIPPSMPDSPSPLVKERPGNIPPTAPPFQPRPSPLLDAVSPRSSSSIGTDRSFVRPYVSKIGILPSSIPQYHKEFMETHKSGHQESTLSNSHSETIEPSPQTEAEKAETVRRLNPHSRSLAKLDEGKKPAGMTPVPVKKAKPTKWQFGIRSRNQPLEAIGCIYRALQKLGAEWLVGDEWTPGQSENNGNKRNDDNDDNDDPNGSGASLHRETSMNDNSKKNRFSGIDKKGNYKLPEDPWVLHVRWKKTDIRRHSIASLNSSTSSPAHPSSMPKDEGLDSIDGGVIMHLDIQLYEMEPGVYLVDFKCAGYETADGMMCEEKDVTSPFPFLDLASKLIIQLAEAD

SEQ ID NO: 9958 - protein, 265 aa, Colwellia psychrerythraea 34H
MTNSHQIVTAINAFNDNYIWAISSQNNDKIALVDPGDAVVCIKYLQENNLALSAILITHHHSDHVGGIEKLLEYSKDKAWPVTVYGPATEKIAQLDITLKENDTVDLTELDCQFTVLDLPGHTKGHIAYYNDKMVFCGDTLFSGGCGRLFEGTPQQMHHSLTKLANLATDTLIYCAHEYTQANLAFALAVEPNNTDLHNYAEQVKVKRQQNQATIPTNIALELQINPFLRCHEESIKLAAQTYSNQNQPNDSEVFSAIRAWKDNF

SEQ ID NO: 9959 - protein, 250 aa, Zea mays
  misc_feature (222)..(222): Xaa can be any naturally occurring amino acid
MAATVAVDNLNPKVLKCEYAVRGEIVIHAQRLQEQLKTQPGSLPFDEILYCNIGNPQSLGQQPVTFFREVLALCDHPDLLQKEEIKTLFSSDSISRAKQILAMIPGRATGAYSHSQGIKGLRDAIASGIASRDGFPANADDIFLTDGASPGVHLMMQLLIRNEKDGILVPIPQYPLYSASIALHGGSLVPYYLNESTGWGLEISDVKKQLEDARSGGIDVRXALVVINPGNPTGQVLAEENNMDIVKFCK

SEQ ID NO: 9960 - protein, 729 aa, Xanthomonas campestris pv. campestris str. ATCC 33913
MAEGGGGSAVALQDLQAIAAGLPGDAFAVLGPHVQADGRLRVRVLAPGAEALGLIDGRGKLLARMQASPIDGVFEGELPADAAYRLRIVWPDVVQEIEDPYAFAPQIDESALLQIGAGDGQALRANLGARHVQVGELPAVRFAVWAPHAQRVAVVGDFNGWEPRRHPMRQRSGGIWELVLPRVETGARYKYAIITADGRVLLKADPVARQSELPPATASVVASADAFAWTDAEWMARRSAAAEPAPLSIYEVHAASWRRDGHDQPLDWVSLAAQLIPYVQELGFTHIELLPITEHPFGGSWGYQPLGLYAPTARHGSPDGFAQFVDACHRAGIGVILDWVSAHFPDDAHGLSQFDGSATYEHADPREGMHRDWNTLIYNYGRPEVTAYLLGSAMEWIAHYHLDGLRVDAVASMLYRDYGRAEGEWVPNAHGGRENLEAVAFLRQLTGEIASQFPGVLTIAEESTAWPGVTAPISEGGLGFTHKWNMGWMHDTLHYMQRDPAARAQHHSQLTFGLVYAFSERFVLPLSHDEVVHGTGGLLGQMPGDDWRRFANLRAYLALMWAHPGDKLLFMGAEFGQWADWNHDRSLDWHLLDHAPHRGMQQLVRDLNRALRRVPALYRGNHRADGFEWSVADDARNSVLAFIRHDPDGGAPLLAVSNLTPQPHHDYRVGVPRAGGWREILNTDSAHYGGSNLGNGGRLLTEPTGMHGHAQSLRLTLPPLATIYLQAEK

SEQ ID NO: 9961 - protein, 585 aa, Xanthomonas campestris pv. campestris str. ATCC 33913
MIERNVTTPAWGAWPAGDGQVRFALWAPDAHTVEVIFDSGERAALQRQDDGFFSGVVACALDARYRYRVDGQTPVPDPASRWQPDGVHGSSAVQRVDGYHWTHTQWQGRPWDEAVIYELHVGACGGYAGVQAQLPQLAAMGITAIELMPLSAFPGAHNWGYDGVLPYAPAEAYGTPDELKALIDAAHGHGLMVLLDVVYNHFGPDGNYLGSYASAFFNEDKPTPWGAAIDFRKPPVQRYFLDNALMWLHEYGFDGLRLDAVHAITPNAFLDTLRETIEASLPAGRHVHLVLENEANQASQLDRGYTAQWDDDFHNALHVLLTGEEEGYYAAFADQPTQHLARVLGEGFAYQGQPDPRGHVRGEPSGALPPHKFVIFAQNHDQIGNRACGERLSVLVSPQRLRAALALTALTPMIPLFFMGEPWGATQPFLFFTDFGPPLDDAVREGRRREFAHFAAFADPAKRETIPDPNSHATFAASRAPIEDAAHGDGAQWAAWFQALLGVRRQWLVPGLAQARALRASVLADGAVTATWELPGGLWHIAFNVGAEAVPLPPLRGRVAHAENVTADAQTLPTDSFIAWYEEHA

SEQ ID NO: 9962 - protein, 361 aa, Leifsonia xyli subsp. xyli str. CTCB07
MATLFGPLTLRGVTARNRIWASPMCMYSVLDRSGVPQTWQLVHLGAIATGGSGIVFTEATAVSPEGRISPRDTGIWTDEQAEAWRPIAAFIAEQGAVPGIQLAHAGRKASSWPAWGFEDRTGSVPAAEGGWPTVAPSPIAFGDLDTPAELDRSGIDRVVAGFRSSARRSVDAGFRVLELHAAHGYLLHQFLSPLANRRDDEYGGSLENRARLLLRIVAEVRTEVGGDVPVFVRFSGSDWTPGGWDEQQTATVAGWAQEAGADFFDISSGGIQTGVRIPLQPGYQVPFAEHVRRSAEVEVSAVGLITTPRQAADIVENGSADAVMLARELLRDPHFPLRAAHELGVPIGYWPPQYLRAAWRG

SEQ ID NO: 9963 - protein, 245 aa, Tontelea attenuata
ALSIAGAVQSQKLAVRAISQIQSLPGGDIKLLCDTVVESVRDLTGYDRVMVYKFHEDEHGEVVAESKRPDLEPYIGLHYPATDIPQASRFLFKQNRVRMIVDCHASPVRVIQDDGLMQPLCLVGSTLRAPHGCHAQYMENMGSIASLAMAVIINGNDEEVIGGRNPTRLWGLVVCHHTSARCIPFPLRYACEFLTQAFGLQLKMELQLAAQLLEKHVLKTQTLLCDMLLRDSPTGIVTQSPSIMD

SEQ ID NO: 9964 - protein, 194 aa, Yarrowia lipolytica CLIB122
MADSDSKPSSGNELELREQDKWLPIANVARIMKSALPENAKVSKEAKECMQECVSEFISFITSEASEKCAAEKRKTVNGEDILFAMLSLGFENYAEALKIYLTKYRQNQNYKQENRSENRKKKTLPAQEGAVAAAATGSNPVTETNSPSQQQQEEYYAAYDVPINGQDPTEQRFSEEPTQDEKAMYDAYTGDYY

SEQ ID NO: 9965 - protein, 245 aa, Tontelea attenuata
ALSIAGAVQSQKLAVRAISQIQTLPGGDIKLLCDTVVESVRDLTGYDRVMVYKFHEDEHGEVVAESKRPDLEPYIGLHYPATDIPQASRFLFKQNRMRMIVDCHASPVRVIQDDGLMQPLCLVGSTLRAPHGCHAQYMENMGSIASLAMAVIINGNDEEVIGGRNPTRLWGLVVCHHTSARCIPFPLRYACEFLMQAFGLQLKMELQLAAQLLEKHVLKTQTLLCDMLLRDSPTGIVTQSPSIMD

SEQ ID NO: 9966 - protein, 374 aa, Tripterygium regelii
ALSIAGAVQSQKLAVLAISQLQSLQGGDIKLLCDTVVESVRDLTGYDRVMVYKFHEDEHGEVVAESKRPDLEPYIGLHYPATDIPQASRFLFKQNRVRTIVDCHALPVRVIQDDGLMQPLCLVGSTLRAPHGCHAQYMKNMGSMASLAMAVVINGNDEEVIGERNTTRLWALVVCHHTSARCIPFPFRYACEFLMQAFGLQLNMELQLAAQLMEKHVLKTRTLLCDMLLRDPPTGIVTQSPSIMDLVKCDGAALHYQGNYYPLGVTPTEAQIKDIVGWLLDFHGDSTGLSTDSLADAGYPEAALLGDAVCGMAVAYITNRDFLFWFRSHTAKEIKWGGAKHHPEDKDDGQRMHPRSSFKAFLEVVKSRSLPWEN

SEQ ID NO: 9967 - protein, 256 aa, Brassica oleracea var. botrytis
MGRGRVQLKRIENKINRQVTFSKRRAGLFKKAHEISVLCDAEVALVVFSHKGKLFEYSTDSCMEKILERYERYSYAERQLIAPESDVNTNWSMEYNRLKAKIELLERNQRHYLGEDLQAMSPKELQNLEQQLDTALKHIRSRKNQLMYDSVNELQRKEKAIQEQNSMLSKQIKEREKVLMAQQEQWDQQNHGQNMPSPPPPQQHQIQHPYMLSHQPSPFLNMGGLYQEEDPMAMRRNDLDLSLEPVYNCNLGCFAA

SEQ ID NO: 9968 - protein, 371 aa, Tripterygium regelii
ALSIAGAVQSQKLAVLAISQLQSLQGGDIKLLCDTVVESVRDLTGYDRVMVYKFHEDEHGEVVAESKRPDLEPYIGLHYPATDIPQASRFLFKQNRVRTIVDCHALPVRVIQDDGLMQPLCLVGSTLRAPHGCHAQYMENMGSMASLAMAVVINGNDEKVIGGRNTTRLWGLVVCHHTSARCIPFPLRYACEFLMQAFGLQLNMELQLAAQLMEKHVLKTRTLLCDMLLRDSPTGIVTQSPSIMDLVKCDGAALHYQGNYYPLGVTPTEAQIKDIVGWLLDFHGDSTGLSTDSLADAGYPEAALLGDAVCGMAVAYITNRDFLFWFRSHTAKEIKWGGAKHHPEDKDDGQRMHPRSSFKAFLEVVKSRSLP

SEQ ID NO: 9969 - protein, 242 aa, Elaeis guineensis
MGRGRVELKRIENKINRQVTFAKRRNGLLKKAYELSVLCDAEVALIIFSNRGKLYEFCSSSSMMKTLERYQKCNYGAPETNIISRETQSSQQEYLKLKARAEALQRSQRNLLGEDLGPLSSKELEQLERQLDASLKQIRSTRTQYMLDQLADLQRKEQMLCEANKSLRRRLEESNQAGQQQVWDPTAHAVGYGRQPPQPQSDGFYQQIDSEPTLQIGYPPEQITIAAAPGPSVNTYMPGWLA

SEQ ID NO: 9970 - protein, 374 aa, Tripterygium regelii
ALSIAGAVQSQKLAVLAISQLQSLQGGDIKLLCDTVVESVRDLTGYDRVMVYKFHEDEHGEVVAESKRPDLEPYIELHYPATDIPQASRFLFKQNRVRTIVDCHALPVRVIQDDGLMQPLCLVGSTLRAPHGCHAQYMENMGSMASLAMAVVINGNDEEVIGGRNTTRLWGLVVCHHTSARCIPFPLRYACEFLMQAFGLQLNMELQLAAQLMEKHVLKTRTLLCDMLLRDSPTGIVTQSPSIMDLVKCDGAALHYQGNYYPLGVTPTEAQIKDIVGWLLDFHGDSTGLSTDSLADAGYPEAALLGDAVCGMAVAYITNRDFLFWFRSHTAKEIKWGGAKHHPGDKDDGQRMHPRSSFKAFLEVVKSRSLPWEN

SEQ ID NO: 9971 - protein, 126 aa, Debaryomyces hansenii CBS767
MSKISDTALHNSDYEIKEQDRFLPIANVGRVMKKALPPHAKLSKESKECIQECVSEFISFITSHASDRGRLEKRKTLNGEDILWSMYILGFENYSETLKIYLAKYRQVCIFIHSVFIREAITKTLV

SEQ ID NO: 9972 - protein, 242 aa, Elaeis guineensis
MGRGRVELKRIENKINRQVTFAKRRNGLLKKAYELSVLCDAEVALIIFSNRGKLYEFCSSSSMMKTLERYQKCNYGAPETNIISRETQSSQQEYLKLKARVEALQRSQRNLLGEDLGPLSSKELEQLERQLDASLKQIRSTRTQYMLDQLADLQRREQMLCEANKSLRRRLEESNQAGQQQVWDPTAHAVGYGRQPPQPQSDGFYQQIDGEPTLQIRYPPEQITIAAAPGSSVSTYMPGWLA

SEQ ID NO: 9973 - protein, 256 aa, Brassica oleracea var. botrytis
MGRGKVELKRIENKINRQVTFAKRRNGLLKKAYELSVLCDAEIALLIFSNRGKLYEFCSNPSGMAKMVEKYRKHSYATMDPNQSAKDLQERYQDYLNLKSRVEVLQHSQRHLLGEEIAGIGVDELEQLECQVDTSLRQIRSTKARSMLDQLSDLKSKEEMLLETNRDLKRKLEESDAALNQTLWGASSSAEHSQQQQEGMTSYHANPLSQEVGFFRPLQGNVALQMSHYNPGVPNASNSATTSQNVINGFFPGWMV

SEQ ID NO: 9974 - protein, 250 aa, Brassica oleracea var. botrytis
MGRGRVELKRIENKINRQVTFAKRRNGLLKKAYELSVLCDAEVALIIFSNRGKLYEFCSSSNMIKTLERYQKCSYGSIEVNNKPAKELENSYREYLKLKGRYEGLQRQQRNLLGEDLGPLNSKELEQIERQLDGSLKQVRSIKTQYMLDQLSDLQTKEQMLLETNRALAMKLDDMIGVRSHHMGGGGGGWEGNEHNVSYAHHQAQSQGLFQPLECNPTLQMGYDNPVCSEQITATTQAQAQPGYIPDWML

SEQ ID NO: 9975 - protein, 479 aa, Zea mays
MARRRPMDYEELNEKVKKAQYAVRGELYLRASELQKEGKKIIFTNVGNPHALGQKPLTFPRQVVALCQAPFLLDDPNVGLMFPPDAIVRAKRYLAMAPGGLGAYSDARGIPGIRKEVADFIHKRDGYPSDPELIYLTDGASKGVMQMLNAIIRNERDGILVPVPQYPLYSAIISLFGGSLVPYYLEEEANWNLDFANIRQAVAEARSKGITVRATVIINPGNPTGQCLSEANIRELVRYCYHENLVLLADEVYQQNVYQDERPFISARKVMFDMGPPISREVQLVSFHTVSKGYWGECGQRGGYFEMTNLPPKTVDEIYKVASIVLSPNVPGQIFMGVMVNPPKPGDISYPKFTAESKSILESLRRRARMMTDGFNSCRNVVCNFTEGAMYSFPQIQLPARAIEAAKRAGKAADVFYCLKLLEATGISTVPGSGFGQKEGVFHLRTTILPAEEDFPTIMSSFKKFNDSFMEQYEGYSRM

SEQ ID NO: 9976 - protein, 242 aa, Elaeis guineensis
MGRGRVELKRIENKINRQVTFAKRRNGLLKKAYELSVLCDAEVALIVFSNRGKLYEFCSSSSMLKTLERYQKCNYGAPETNIVSRETQTSQQEYLKLKARVEALQRSQRNLLGDDLGPLSSKELEQLERQLDASLKQIRSTRTQYMLDQLADLQRREQMLCEANKSLKQRLEESNQATQQQVWDPNAPAVGYGRQPPQPQGDGFYQQIECDPTLHIGYPPEQITIAAAPGPSVSNYMPGWLA

SEQ ID NO: 9977 - protein, 91 aa, Glycine max
  misc_feature (45)..(45): Xaa can be any naturally occurring amino acid
  misc_feature (51)..(51): Xaa can be any naturally occurring amino acid
  misc_feature (80)..(80): Xaa can be any naturally occurring amino acid
MSRKIESLGVERVISGEGSHGMFGGYLYFSKAPSKEEFLPEAMRXIKALLXYDCLRATRSTFDRGLEARVPFLNKECYEXAMNIDPQCAMI

SEQ ID NO: 9978 - protein, 206 aa, Cucumis sativus
MPSRRRTLLKVIILGDSGVGKTSLMNQYVNKKFSNQYKATIGADFLTKEVQFEDRLFTLQIWDTAGQERFQSLGVAFYRGADCCVLVYDVNSMKSFDNLNNWREEFLIQASPSDPENFPFVVLGNKVDVDGGNSRVVSEKKARAWCASKGNIPYFETSAKEGINVEEAFQCIAKNALKSGEEEEIYLPDTIDVGSNNQPRSSGCDC

SEQ ID NO: 9979 - protein, 346 aa, Brassica napus
  misc_feature (161)..(161): Xaa can be any naturally occurring amino acid
STHASAGLKPMRHPYSLSVGQSVFRPGRVTHALNGDALAQALMDSNHPTGGLANYEEWTIDLRKLHMGPAFAQGAFGKLYRGTYKGEDVAIKLLERPENSPEKAQALEQQFQQEVSMLAFLKHPNIVRFIGACVKPMVWCIVTEYAKGGSVRQFLTKRQNXAVPLKLAVKQALDVARGMDPRDERNFIHRDLKSDNLLISADRSIKIADFGVARIEVQTEGMTPETGTYRWMAPEMIQHRPYTQKVDVYSFGIVLWELITGLLPFQNMTAVQAAFAVVNRGVRPTVPADCLPVLGEIMTRCWDANPEVRPCFAEVVNLLEAAETEIMTTARKARFRCCMTQPMTID

SEQ ID NO: 9980 - protein, 788 aa, Streptomyces coelicolor A3(2)
MTPRPSSSGPDPRKTTGKKPAGKTPTGKKPAKAAKKKAPRRTTASANASATTSVSGAEVAVSPAPDAADRERLLAGTHHDPHAVLGAHRVPGGVAFRVFRPYALAVTVLSGELRVGLHDDGDGFFSGLVPLKDVPAHRLLVAYEGREQEVEDPYRFLPTLGELDLHLLGEGRHEQLWRALGAHPTTHEGVAGTRFAVWAPNARGVRVAGGFNFWDGTGHPMRSLGSTGVWELFLPGVGAGELYKFEITRPDGSRTFRADPLARRTEVPPATSSVVHASDYTWGDEEWLAHRADAPAHEAPMSVYEVHLPSWRPGLTYRQLAEQLPAYVADLGFTHVELMPVAEHPFGGSWGYQVTGFYAPTARLGDPDDFKYLVDRLHRAGIGVLMDWVPAHFPRDDWALAEFDGRPLYEHSDPLRAAHPDWGTLEFDFGRREVRNFLVANAVYWCEEFHIDGLRVDAVASMLYLDYSREPGEWEPNEHGGRENLDAVAFLQEMNATLYRRVPGVVTVAEESTAWDGVTRATHHEGPSGFGGLGFGLKWNMGWMHDSLDYMSHEPVHRKHHHGEMTFSMVYAYSENYVLPISHDEVVHGKRSLVSKMPGDWWQQRANERAYLGFMWAHPGKQLLFMGQEFAQGAEWSEAHGPDWWLLDPEYGASADHRGVRDLVRDLNTVYRATPALWRRDTHPSGFSWVVGDAAEDNVLAFLRLDADGTPLLAVSNFAPVVRSGYRLGVPDEVPAWHEVLNTDAARYGGGDVVNPDPVKPEPQGWHGRPASIRLTLPPLATVWLRPA

SEQ ID NO: 9981 - protein, 472 aa, Bartonella birtlesii
LREVASKTNDIAGDGTTTATVLGQAIVQEGVKAVAAGMNPMDLKRGIDSAVAEVVESLFKKAKKIQTSAEIAQVGTISANGASEIGKIIADAMDKVGNEGVITVEEAKTAETELEVVEGMQFDRGYLSPYFVTNAEKMVADLDDPYILIHEKKLSNLQSLLPVLEAVVQSGKPLLIIAEDVEGEALATLVVNKLRGGLKICAVKAPGFGDRRKAMLEDIAILTSGQVISEDVGIKLENVTLDMLGRAKKVHISKENTTIVDGSGQKAQISARVSQIKAQIEETTSDYDREKLQERLAKLAGGVAVIRVGGATEVEVKEKKDRVDDALNATRAAVEEGIVAGGGTALLRAANAITVKGSNADQEAGINIVRRALQAPARQIATNAGEEAAIIVGKVLENNSDTFGYNTATGQFGDLISLGIVDPVKVVRSALQNAASIASLLITTEAMVAELPKKETPMPPMGGGRNGWNGRN

SEQ ID NO: 9982 - protein, 529 aa, Guillardia theta
MSKIILYQEDARRALERGMDILAEAVSVTLGPKGRNVVLERKYGAPQIVNDGVTIAKEIELEDHIENTGVALIRQAASKTNDVAGDGTTTATVLAHAMVKQGMKNVAAGANAIALKRGIEKATQFIVTQIAEYARPVEDTRAISQVASISAGNDIETGKMIADAIDKVGREGVISLEEGKSTITELEMTEGMCFEKGFISPYFVTDTERMEVIQDNPYILLTDKKITLVQQELLPTLELISKTSRPLVIIAEDVEKEALATLVVNKLRGIVNVVAVRAPGFGDRRKAMLEDIAILTGGQVISEDAGFSLETLTLDMLGQARRITITKENTTIIAEGNEKDVKSRCEQIRRQIEASDSSYEREKLQERLAKLAGGVAVIKVGAATETEMKDKKLRLEDAINATKAAVEEGIVPGGGSTLTHLANDLKDWAEDNLIEDELIGALIVERSLTSPLRRIIENTGQNSAIIIEQIKESEFNIGYDAAKGEIVDMYDVGIIDPAKVTRSGLQNAASIASMILTTECIVVDKQDEK

SEQ ID NO: 9983 - protein, 222 aa, Brassica napus
  misc_feature (193)..(193): Xaa can be any naturally occurring amino acid
  misc_feature (213)..(213): Xaa can be any naturally occurring amino acid
MSLKALDYESLNENVKNCQYAVRGELYLRASELQKEGKKIIFTNVGNPHALGQKPLTFPRQVVALCQAPFLLDNPNVGMIFPADAIARAKHYLSLTSGGLGAYSDSRGLPGVRKEVAEFIQRRDGYPSDPELIFLTDGASKGVMQILNCIIRNQKDGILVPVPQYPLYSATISLLGGTLVPYYLEETDNWGLXDVNNLRQSVAQARSQGITVXMVIIKPRNP

SEQ ID NO: 9984 - protein, 720 aa, Xanthomonas campestris pv. campestris str. ATCC 33913
MATRKFTQRSRIREGRPNPLGATWDGLGVNFALYSRNATRVELCLFDERGREQERIPLPEYTDEVWHGYLPDARPGQLYGYRVHGPYAPDAGHRFNHNKLLLDPYAKQIVGELKWAPHLFGYTIGHRDKDLSFDRRDSAAFMPKSAVIDPAFTWGQDRPPQTPWNRTVIYEAHVRGLSMLHPAVPPENRGTFSALKTDELIDHISSLGVTAVELLPVHAFVDDQYLLEKGLRNYWGYNTLGFFAPQGRYMSTRTVAEFKQMVARLHHAGLEVLLDVVYNHTAEGNELGPTLSFKGIDNASYYRLADDRRFYINDTGTGNTFDLTNVGALRMVMDSLRYWVQEMHVDGFRFDLASILGRERYGFDPSGSFLDAVRQDPVLSQTKLIAEPWDIGPGGYQVGNFPPGWVEWNDKFRDNVRAFWRGDGGQLAELATRLTGSADLFNHSGRRPTASVNFVTAHDGFTLRDLVSYEGKHNLANGEDGRDGSDHNISANYGAEGETDNPAIKQLRRQQMRNLLATLLLSQGTPMLLAGDEFGHSQNGNNNAYCQDNELTWIDWTAATKAAAADQAAFVRRLIRIRQRYPLLHRARFFDGKFDEALGLKDLTWLAPNGNEMDEAAWHDPEARALMLRLDGRSPTTGLREIAANVTLLMLINAAPTSVAFTLPAMHDEHWRVLVDTARHGGRVVAGGSEWKAPAHSLTLLAVERDRIASSARIVSEGAR

SEQ ID NO: 9985 - protein, 721 aa, Chlamydophila abortus S26/3
MVERIVNSEDVSLLVSGRQSNPHKFLGIVSENSSQDRIILFRPGAHSVVVELQGNIAHAQHHHSGIFSLTAPKGTLPQDYRIYHQNGLLAHDPYAFPPLWGEVDSFLFHQGTHYKIYECMGAIPYNVQGISGVLFVVWAPHAQRVSVVGDFNFWNGLVNPLRKVSDLGVWELFIPGLEEGTLYKWEIVSASGEVLIKTDPYGKRFDVPPHAPSRVVDSDRYTWHDAAWMEKRKHRGDQPLAIYEVHVGSWQWHEGKPLGYRELAKKLAAYCKEMHYTHVELLPVTEHPLNESWGYQVTGYYAPTCRYGTPEDFQFFVDHLHRENIGVILDWVPGHFPTDGFALAHFDGEALYESIENHEPLHPHWRTYTFDYRCNEVVNFLLGSALFWLDKMHIDGLRVDAVTSMLYLDYGRQEGEWSPNIYGGRENLQAIEFIKHLNSVVHREFPGVLTFAEESTDFPKVTQAVAQGGLGFDYKWNLGWMHDTFRYIQVDPLFRSYHHKDLTFSLWYAFNERYLLPLSHDEVVHGKGSLLQKMPGDTWTKFAHMRLLLSYHICQPGKKLLFMGGEFAQGKEWTPDSPLDWHLLDHPDHAYLHKCVARMNALYCDLPYFWKGDGKQGSFRWVDFKDTENHVIAYYRFSGEDRSSALLCVHHFSSGYFPSYVLYCQDIHSCQLLFNSDDCCFGGSGKGNRQPVLCLDQHVSWGIDIELPPLATLIFHVDFVN

SEQ ID NO: 9986 - protein, 421 aa, Arabidopsis thaliana
MEKKGSVLMLRYEVGKFLGQGTFAKVYHARHLKTGDSVAIKVIDKERILKVGMTEQIKREISAMRLLRHPNIVELHEVMATKSKIYFVMEHVKGGELFNKVSTGKLREDVARKYFQQLVRAVDFCHSRGVCHRDLKPENLLLDEHGNLKISDFGLSALSDSRRQDGLLHTTCGTPAYVAPEVISRNGYDGFKADVWSCGVILFVLLAGYLPFRDSNLMELYKKIGKAEVKFPNWLAPGAKRLLKRILDPNPNTRVSTEKIMKSSWFRKGLQEEVKESVEEETEVDAEAEGNASAEKEKKRCINLNAFEIISLSTGFDLSGLFEKGEEKEEMRFTSNREASEITEKLVEIGKDLKMKVRKKEHEWRVKMSAEATVVEAEVFEIAPSYHMVVLKKSGGDTAEYKRVMKESIRPALIDFVLAWH

SEQ ID NO: 9987 - protein, 582 aa, Schizosaccharomyces pombe
MVSFLSSSVSRLPLRIAGRRIPGRFAVPQVRTYAKDLKFGVDARASLLTGVDTLARAVSVTLGPKGRNVLIDQPFGSPKITKDGVTVARSVSLKDKFENLGARLVQDVASKTNEVAGDGTTTATVLTRAIFSETVRNVAAGCNPMDLRRGIQLAVDNVVEFLQANKRDITTSEEISQVATISANGDTHIGELLAKAMERVGKEGVITVKEGRTISDELEVTEGMKFDRGYISPYFITDVKSQKVEFENPLILLSEKKVSAVQDILPSLELAAQQRRPLVIIAEDVDGEALAACILNKLRGQLQVVAIKAPGFGDNRRNMLGDLAVLTDSAVFNDEIDVSIEKAQPHHLGSCGSVTVTKEDTIIMKGAGDHVKVNDRCEQIRGVMADPNLTESEKEKLQERLAKLSGGIAVIKVGASSEVEVNEKKDRIVDALNAVKAAVSEGVLPGAGTSFVKASLRLGDIPTNNFDQKLGVEIVRKAITRPAQTILENAGLEGNLIVGKLKELYGKEFNIGYDIAKDRFVDLNEIGVLDPLKVVRTGLVDASGVASLMGTTECAIVDAPEESKAPAGPPGMGGMGGMPGMM

SEQ ID NO: 9988 - protein, 382 aa, Schizosaccharomyces pombe
MNDRGELFKPIKVGNMLLQHRIVHAPMTRLRATDYGKITGLMVEYYSQRSMIPGTLLIADATFVGEKSGGFPNNPRCFTKEQAESWIPLVEAVHKNKSFLFIQFWPLPGDLKDEYRNDLEKMQKITYSDCPQDPGGLPAGIHSFDAVQGVEVYKKKYMSKRDIQEHIQDFVNAADLAVNIAKADGVEIHQVNGFLLDRFVLGGFGDQCDPEYRGSIENRCRFPLEVLEAVTRKIGQERVGYRISPFSGWMQKIDFMEVNIYLMSEIAKRFPKLAYIHAIEPRKYWSGHKLVSSEQNTSFLQKYWKGPFITAGGYDPETAVQAANERGVLVAFGRNFIANPDLVFRIKHHIPLNKWDRSSFYLPKTEKGYTDYPFSKEFLQSK

SEQ ID NO: 9989 - protein, 243 aa, Triticum aestivum
  misc_feature (173)..(173): Xaa can be any naturally occurring amino acid
MVQSKKKFRGVRQRHWGSWVSEIRHPLLKRRVWLGTFETAEEAARAYDEAAILMSGRNAKTNFPVPRSANGEIIVAPAAARDGRGVGSSSSGAAGASSLSQILSAKLRKCCKTPSPSLTCLRLDTEKSHIGVWQKRAGARADSSWVMTVELNKEPATAAAAPTPKRQHGVGDXPSSSTSTSTTGSPPEALEDEERIALQMIQELLNRSTPASPVNGLVHGEKGTSSSEKIIARLESLSGYLPD

SEQ ID NO: 9990 - protein, 371 aa, Tripterygium regelii
ALSIAGAVQSQKLAVLAISQLQSLQGGDIKLLCDTVVESVRDLTGYDRVMVYKFHEDEHGEVVAESKRPDLEPYIGLHYPATDIPQASRFLFKQNRVRTIVDCHALPVRVIQDDGLMQPLCLVGSTLRAPHGCHAQYMENMGSMASLAMAVVINGNDEEVIGGRNTTRLWGLVVCHHTSARCIPFPLRYACEFLMQAFGLQLNMELQLAAQLMEKHVLKTRTLLCDMLLRDSPTGIVTQSPSIMDLVKCDGAALHYQGNYYPLGVTPTEAQIKDIVGWLLDFHGDSTGLSTDSLADAGYPEAALLGDAVCGMAVAYITNRDFLFWFRSHTAKEIKWGGAKHHPEDKDDGQRMHPRSSFKAFLEVVKSRSLP

SEQ ID NO: 9991 - protein, 102 aa, Oryza sativa
MSSDGGPVLGGLEPVGNENDLHLVDLARFAVTEHNKKANSLLEFEKLVSVKQQVVAGTLYYFTIEVKEGDAKKLYEAKVWEKPWMDFKELQEFKPVDASANA

SEQ ID NO: 9992 - protein, 574 aa, Caulobacter crescentus CB15
MARPLLDDSIDLIASTGRQARPARLGMAVLVAGFLGFNVSAAIAIVWFAAAMVAEVYGLGVTRLSRRLNLSPVLRRLGYVTVVIVMVGVWTALTLVLWTSGNPALQWAAICLAAGQLIHAQSVTFRAPVLFAIDVGMPSTSLIVMPILTGGFAPVQIATMMTAVALMLLYTFTSATANNRRIAALEAAEAQALKASEAKSAFLAMISHEIRTPMNGVLAMTDALSRADLGPDQARQTALLKRSGEDLMTLLNDVLDISRIEAGKLEIECQPFDLPELLGDLRALWTPAATDKGLDLVLTIAPGLDAYRLGDPTRLRQILGNLVSNAVKFTRSGGVALSARPGEAPGAVVFDVADTGIGMTPEQQGRLFQSFSQADASIARRFGGSGLGLSICSQLATLMDGAITVDSDLGSGSTFRLTLPLPVTERPAAPAPAEPAADTAETPATPDSLAGLTVLVADDHPVNQAVARAILEAVGARVAVADNGEAALASLKSAPADLVLMDLHMPGLGGRETVRRIRRGEGGDPAVPIIALTGEALGEDPAAWRAEGFDAVQQKPVVARDLLAAAARLTARTA

SEQ ID NO: 9993 - protein, 360 aa, Wimmeria acuminata
AVQSQKLAVRAISQLQSLPGGDIKLLCDTVVESVRHLTGYDRVMVYKFHEDEHGEVVAERKRPDLEPYIGLHYPATDIPQASRFLFKQNRVRTIVDCHASPVRVIQDDGLMQPLCLVGSTLRAPHGCHAQYMENMGSIASLAMAVIINGNDEEVIGVRNATRLWGLVVCHHTSARCIPFPLRYACEFLMQAFGLQLNMDLQLAAQLSEKHVWKTRTLLCDMLLRDSPAGIVTQSPSIMDLVKCDGAALYYQGNYYPLGVTPTEAQITDIVGWLLDFHGDSTGLSTDSLADAGYPGAALLGDAVCGMAVAYITNRDFLFWFRSHTAKEIKWGGAKHHPEDRDDGQRMHPRSSFQAFLEVVK

SEQ ID NO: 9994 - protein, 392 aa, Schizosaccharomyces pombe
MAVQKLYESQSKLFQPIKVGNMQLQHRMVHAPATRLRCLDNGLVMTDLVKEYYKQRSSIPGTLLITESLFSGAKSGGFSNIPCLYNDEHVEAWKPIVQAIHDNDCFVFIQFWNLPGELKVDYLEDQERLEKVTQGECPMDPTGLPAALGSAYSICGEELYVDKFMTKQDIQEHITTYTEAAKRAVFGCGADGVEVHQVNGFLLDKFVLNGYGDKCDPEYCGSLENRARFCLELLESVVNAIGQERVGYRISPFSDIWKDKDSFEAHVFMIKKIKERFPNLAYLHAIEPRQYWNGHVHITQEKNTLIYKNLWGDPFITAGGHDRDSAIQMAEQENTLVAFGRYFLSNPDLPFRLKYNLPLNKWDRATFYTKMSPKGYIDYPFSKEFLDTKKVE

SEQ ID NO: 9995 - protein, 151 aa, Clostridium acetobutylicum ATCC 824
MFGMVPFRRNNNGLMRREDFFDKMFDNFFSDDFFPTTTFNGNAGFKVDIKEDDDKYTVAADLPGVKKDNIELQYENNYLTINAKRDDIVETKDDNNNFVRRERSYGELRRSFYVDNIDDSKIDASFLDGVLRITLPKKVKGKDNGRRIDIH

SEQ ID NO: 9996 - protein, 374 aa, Wimmeria concolor
ALSIAGAVQSQKLAVRAISQLQSLPGGDIKLLCDTVVESVRHLTGYDRVMVYKFHEDEHGEVVAERKRPDLEPYIGLHYPATDIPQASRFLFKQNRVRTIVDCHASPVRVIQDDGLMQPLCLVGSTLRAPHGCHAQYMENMGSIASLAMAVIINGNDEEVIGVRNATRLWGLVVCHHTSARCIPFPLRYAWEFLMQAFGLQLNMELQLAAQLSEKHVWKTRTLLCDMLLRDSPTGIVTQSPSIMDLVKCDGAALYYQGNYYPLGVTPTEAQITDIVGWLLDFHGDSTGLSTDSLADAGYPGAALLGDAVCGMAVAYITNRDFLFWFRSHTAKEIKWGGAKHHPEDRDDGQRMHPRSSFQAFLEVVKSRSLPWEN

SEQ ID NO: 9997 - protein, 374 aa, Zinowiewia concinna
ALSIAGAVQSQKLAVRAISQLQSLPGGDIKLLCDTVVETVRVLTGYDRVMVYKFHEDEHGEVVAESKRPDLEPYIGLHYPATDIPQASRFLFKQNRVRMIVDCHATPVSVIQDAGLMQPLCLVGSTLRAPHGCHAQYMENMGSIASLAMAVIINGNDEEGIGGRNTTRLWGLVVCHHTTARCIPFPLRYACEFLLQALGLQLNMELQLAAQLSEKHVLRTQTLLCDMLLRDSHTGIVTQSPSIMDLVKCDGAALYYQGKYYPLEVTPTEAQIKDIVEWVLAFHGDSTGLSTDSLADAGYPGAASLGDAVCGMAVAYITDRDFLFWFRSNTAKEIKWGGAKHHPEDKDDGQRMHPRSSFKAFLEVVKSRSLPWEN

SEQ ID NO: 9998 - protein, 259 aa, Brassica oleracea var. botrytis
MGRGRVEMKRIENKINRQVTFSKRRNGLLKKAYELSVLCDAEVALIVFSSRGKLYEFGSVGVERTIERYHRCYNCSVTNNRPEESKQNWCQEVAKLKAKYESLVRTNRHLLGEDIGEMGVKQLQALERQLEAALTATRQRKTQVMMEEMEDLRKKERQLGDINKQLKIKFEAGGHAFKSFQDFWPNSAASMAGDPNNSKFPVQPSHPDSVDCNTEPFLQIGLVLVYIRFQQHYYVQGEGSSVPKSNVACETNFVQDWFL

SEQ ID NO: 9999 - protein, 156 aa, Triticum aestivum
MATDPSKYKLNHSMIRIKDPKRSVQFYEFLGMKQINQIKNPDAKFDLYFLAYDSPKAVSHGNHWTDREGIVELTHNYGTEDDPNYKISNGNTEPHKGFGHLCISVDNLQAACQRLEDAGYKFQKKLTDGRMRHIAFVLDPDGYWVEVIGQKPLEET

SEQ ID NO: 10000 - protein, 749 aa, Aspergillus fumigatus
MATKIAGGLHRAQEVLQNTSSKSKKLVDLERDTADAHTQQPLTTDHGVRVSNTDQWLRVTNDRRTGPSLLEDQIAREKIHRFDHERIPERVVHARGTGAFGNFKLKESIEDLTYAGVLTDTSRNTPVFVRFSTVQGSRGSADTVRDVRGFAVKFYTDEGNWDIVGNNIPVFFIQDAVKFPDFVHAVKPEPHNEVPQAQTAHNNFWDFVYLHPEATHMFMWAMSDRAIPRSYRMMQGFGVNTFALVNKEGKRHFVKFHWIPHLGVHSLVWDEALKLGGQDPDFHRKDLMEAIDNKAYPKWDFAIQVIPEEKQDDFEFDILDATKIWPENLVPLRVIGELELNRNVDEFFPQTEQVAFCTSHIVPGIDFTDDPLLQGRNFSYFDTQISRLGINWEELPINRPVCPVLNHNRDGQMRHRITQGTVNYWPNRFEAVPPTGTKGSGVGGGFTTYPQRVEGIKNRALNDKFREHHNQAQLFYNSMSEHEKLHMKKAFSFELDHCDDPTVYERLAGHRLAEIDLELAQKVAEMVGAPIPAKALKQNHGRRAPHLSQTEFIPKNPTIASRRIAIIIGDGYDPVASTGLKTAIKAASALPFIIGTKRSAIYATEDKTSSKGIIPDHHYDGQRSTMFDATFIPGGPHVATLRQNGQIKYWISETFGHLKALGATGEAVDLVKETLSGTLHVQVASSQSPEPVEWYGVVTAGGKQKPESFKESVQILKGATDFVGKFFYQISQHRNYQRELDGLASTIAF

SEQ ID NO: 10001 - protein, 374 aa, Zinowiewia concinna
ALSIAGAVQSQKLAVRAISQLQSLPGGDIKLLCDTVVETVRVLTGYDRVMVYKFHEDEHGEVVAESKRPDLEPYIGLHYPATDIPQASRFLFKQNRVRMIVDCHATPVSVIQDAGLMQPLCLVGSTLRAPHGCHAQYMENMGSIASLAMAVIINGNDEEGIGGRNTTRLWGLVVCHHTTARCIPFPLRYACEFLLQALGLQLNMELQLAAQLSEKHVLRTQTLLCDMLLRDSHTGIVTQSPSIMDLVKCDGAALYYQGKYYPLEVTPTEAQIKDIVEWLLAFHGDSTGLSTDSLADAGYPGAASLGDAVCGMAVAYITDRDFLFWFRSNTAKEIKWGGAKHHPEDKDDGQRMHPRSSFKAFLEVVKSRSLPWEN

SEQ ID NO: 10002 - protein, 226 aa, Brassica napus
  misc_feature (18)..(18): Xaa can be any naturally occurring amino acid
  misc_feature (46)..(46): Xaa can be any naturally occurring amino acid
  misc_feature (70)..(70): Xaa can be any naturally occurring amino acid
  misc_feature (170)..(170): Xaa can be any naturally occurring amino acid
SILPKYKLGKTLCIGSFXAKVKIGEHLLTGHKVAIKILNRRKIKTXQIEDKVRREIKILRLFIHPHVIHXYEVIESPGDIYLVMESVKSAELFDYIVEKGRLQEDEGRNFFQQIISGVEYCHRNMVVRRDLKPENLLLNSMCNIKIADFWLSNVMRDGHFLKTSCGSPNXSCSQIISGKLYSGPEVDVLSCGVIFYALLCGTLPFDDENIPNLFKKIKVLYFDSAQ

SEQ ID NO: 10003 - protein, 331 aa, Kineococcus radiotolerans SRS30216
MNLLPRSRGPSRLPEPPTMPATRTNRPRPPRRAPQKIPPTTGATHVPTHIPTTTLNNGVQMPVLGFGVFQVPAEEAERVVTDALAAGYRHLDTAAAYENEAGVGRAIAASGIPREELFVTTKLWIQDAGEQAAPAAFDRSLQRLGLDYLDLYLIHQPYGDYYGSWRAMEELNRTGRARAIGVSNFHPDRLVDLIDHTEVVPAVNQIETHPFFQRGTDHDVMRQRGVQHESWGPLGQGRDDLLTYPLLTELATAHGKTVAQVVLRWLLQRDTVVIPKSSRPQRMAENLDVFDFSLTEQEMTRIASLDTGVSAVFDHRDPASVAAFGTVRFDT

SEQ ID NO: 10004 - protein, 300 aa, Mannheimia succiniciproducens MBEL55E
MQWLKYKHRCKYSLGGNKMQTFKLNNGVEIPVLGFGVFQIPPEETEQAVISAIHAGYRHIDTAQAYMNETETGAGIRNSGVVREEIFVTSKVWIENYGYEAAKASLDRTLARLDIGYIDLMLLHQPFNDVYGAWRALEEYLAAGKIRAIGLSNFTADRVLDVGLYNKVMPAVNQIEINPFHQQQAQVEGLLSEGIVPEAWGPFAEGKFGIFENPVLAKIGQKYGKSIAQVVTRWLVQRGVVVLAKSTRPERMAENLNVFDFELDADDFAQIAALDVGKSQIISHTDLAMVRQFKEWVFNV

SEQ ID NO: 10005 - protein, 304 aa, Kineococcus radiotolerans SRS30216
MSHTPSTSTPTPALTLNNGVTMPALGLGVFQSEPEETTDAVEAALATGYRHIDTAAGYGNEREVGEGVRRSGLERSEVFLETKVWVSDYGYEQTLHAFTKSAAKLGVEQIDLLILHQPMPQHFERTRAAYRALERLLTDGAVRAIGVSNFLPHHLTGLLEQAEVVPAVNQVELHPYFTQPDVQAANAAHGILTQAWSPIGGITFYPGWGENRTSALADPTIAAIAAAHGKTPAQVMLRWHLQQGRSAIPKSTKPTRIAENFAVHGFTLDDDELARLDSLDTGRRGGPDPDAVDPSTWDLTIPDA

SEQ ID NO: 10006 - protein, 349 aa, Schizosaccharomyces pombe
MAEFIRTQIFGTCFEITTRYSDLQPIGMGAFGLVCSAKDQLTGMNVAVKKIMKPFSTPVLAKRTYRELKLLKHLRHENIISLSDIFISPFEDIYFVTELLGTDLHRLLTSRPLETQFIQYFLYQILRGLKFVHSAGVIHRDLKPSNILINENCDLKICDFGLARIQDPQMTGYVSTRYYRAPEIMLTWQKYNVEVDIWSAGCIFAEMIEGKPLFPGRDHVNQFSIITELLGTPPMEVIETICSKNTLRFVQSLPQKEKVPFAEKFKNADPDAIDLLEKMLVFDPRKRISAADALAHNYLAPYHDPTDEPVADEVFDWSFQDNDLPVETWKVMMYSEVLSFHNMDNELQS

SEQ ID NO: 10007 - protein, 546 aa, Helicobacter pylori
MAKEIKFSDSARNLLFEGVRQLHDAVKVTMGPRGRNVLIQKSYGAPSITKDGVSVAKEIELSCPVANMGAQLVKEVASKTADAAGDGTTTATVLAYSIFKEGLRNITAGANPIEVKRGMDKAAEAIINELKKASKKVGGKEEITQVATISANSDHNIGKLIADAMEKVGKDGVITVEEAKGIEDELDVVEGMQFDRGYLSPYFVTNAEKMTAQLDNAYILLTDKKISSMKDILPLLEKTMKEGKPLLIIAEDIEGEALTTLVVNKLRGVLNIAAVKAPGFGDRRKEMLKDIAILTGGQVISEELGLSLENAEVEFLGKAGRIVIDKDNTTIVDGKGHSDDVKDRVAQIKTQIASTTSDYDKEKLQERLAKLSGGVAVIKVGAASEVEMKEKKDRVDDALSATKAAVEEGIVIGGGAALIRAAQKVHLNLHDDEKVGYEIIMRAIKAPLAQIAINAGYDGGVVVNEVEKHEGHFGFNASNGKYVDMFKEGIIDPLKVERIALQNAVSVSSLLLTTEATVHEIKEEKAAPAMPDMGGMGGMGGMGGMM

SEQ ID NO: 10008 - protein, 140 aa, Glycine max
MVSFEMNDRKKIGLGLTGFGIFFSFLGIIFFFDKGLLAMGNVLFVSGVSITIGLKSTMQFFMKRSNFKGTISFGVGFFILIMGWPIVGMIVEAYGFVVLFSGFWPTLAVFLQKIPVLGWLFQQPFIRSLFDRYRGKRMPV

SEQ ID NO: 10009 - protein, 95 aa, Brassica rapa
GTSRDVDPNANDLQVESLARFAVDEHNKKENVSLEYRRLIGAKTQVVAGTMHHLTVEVADGETKKVYEAKVLEKAWENLKKLEDFTHLRMFSFIT

SEQ ID NO: 10010 - protein, 493 aa, Glycine max
VIESRFPLAHRRKKGLGSRNRDSGKEFSIGVVPRISSICYPQCGYFPSSGGFTAKRRKCNSLLRLKDCSENIRQHASILFVRLVTGVMLVMAVSLASSEPSWALSEENLLFLEAWRTIDRAYIDKSFNGQSWFRYREDALRNEPMNNRDETYTAIRKMLATLDDPFTRFLEPEKFRSLRSGTKGALTGVGLSIGYPTKADMQPGGLVVISASPGGPAYRAGVSSGDVILAIDDTNTENMGLYDAAERLQGPEGSSIALTIRSGSDIKHLDLTREKVSLNPVKSRLCKLPASGNDSPTIGYIKLTSFNQKASSAIKEAINTLRSDNVNAFVLDLRDNSGGLFPEGIEIAKIWLDKGVIVYICDSRGVRDILDTDGSSALATSEPLVVLVNKGTASASEILAGALKDNKRAVLFGEPTFGKGKIQSVFELSDGSGLVVTVARYETPAHTDIDKVGVIPDHPLPISFPKDEDAFCNCLQDPASSCYVNRIQLFSKS

SEQ ID NO: 10011 - protein, 460 aa, Mycobacterium bovis AF2122/97
MSRSHPSVPAHSIAPAYTGRMFTAPVPALRMPDESMDPEAAYRFIHDELMLDGSSRLNLATFVTTWMDPEAEKLMAETFDKNMIDKDEYPATAAIEARCVSMVADLFHAEGLRDHDPTSATGVSTIGSSEAVMLGGLALKWRWRQRVGSWKGRMPNLVMGSNVQVVWEKFCRYFDVEPRYLPMERGRYVITPEQVLAAVDENTIGVVAILGTTYTGELEPIAEICAALDKLAAGGGVDVPVHVDAASGGFVVPFLHPDLVWDFRLPRVVSINVSGHKYGLTYPGVGFVVWRGPEHLPEDLVFRVNYLGGDMPTFTLNFSRPGNQVVGQYYNFLRLGRDGYTKVMQALSHTARWLGDQLREVDHCEVISDGSAIPVVSFRLAGDRGYTEFDVSHELRTFGWQVPAYTMPDNATDVAVLRIVVREGLSADLARALHDDAVTALAALDKVKPGGHFDAQHFAH

SEQ ID NO: 10012 - protein, 255 aa, Xanthomonas campestris pv. campestris str. ATCC 33913
MRLTALPAFDDNYIWALVANDGRAVIVDPGQAAPVLEAAQREGFTPVAALLTHHHADHIGGVAELQQHFPALELYGPDDERMPSATRHVAHGDTVTALGIDFAVLEVPGHTRSHVAYVGDGHLFSGDTLFSLGCGRMFEGTPPQMFDALQRLASLPGETLVCCGHEYTLANAAFALHVDPTNAALQRRQQEAQAMRHAARPTLPISLKSELATNPFLRLHTPEIRAAAAAHASISITSDVDVFAELRRWKDAFRA

SEQ ID NO: 10013 - protein, 122 aa, Triticum aestivum
  misc_feature (16)..(16): Xaa can be any naturally occurring amino acid
  misc_feature (67)..(67): Xaa can be any naturally occurring amino acid
ERTSGGYFELVGFDPXEVQQEIYKFVSIGLCAPVVAQCLVELMVNPPREGSPSYELYRQEYDGIFNXLKTRAFALYEAFKEMEGVECDEPQGSMYLFPTIKLSSKAVEAAKKEGRSPDEYYA

SEQ ID NO: 10014 - protein, 770 aa, Synechocystis sp. PCC 6803
MTYTINADQVHQIVHNLHHDPFEVLGCHPLGDHGKVNQWVIRAYLPTAEAVTVLLPTDRREVIMTTVHHPNFFECVLELEEPKNYQLRITENGHERVIYDPYGFKTPKLTDFDLHVFGEGNHHRIYEKLGAHLMTVDGVKGVYFAVWAPNARNVSILGDFNNWDGRLHQMRKRNNMVWELFIPELGVGTSYKYEIKNWEGHIYEKTDPYGFYQEVRPKTASIVADLDGYQWHDEDWLEARRTSDPLSKPVSVYELHLGSWLHTAYDEPVKTLHGEGVPVEVSEWNTGARFLTYYELVDKLIPYVKELGYTHIELLPIAEHPFDGSWGYQVTGYYAPTSRFGSPEDFMYFVDQCHLNGIGVIIDWVPGHFPKDGHGLAFFDGTHLYEHGDPRKGEHKEWGTLIFNYGRNEVRNFLVANALFWFDKYHIDGMRVDAVASMLYLDYCREEGEWVANEYGGRENLEAADFLRQVNSVVYSYFPGILSIAEESTSWPMVSWPTYVGGLGFNLKWNMGWMHDMLDYFSMDPWFRQFHQNSITFSMWYNHSENYMLALSHDEVVHGKSNMLGKMPGDEWQKYANVRALFTYMFTHPGKKTMFMSMEFGQWSEWNVWGDLEWHLLNFPPHQQLKQFFTELNHLYKNEPALYSNDFDESGFQWIDCSDNRHSVVSFIRRAKNSAEFVVTICNFTPQPHSHYRVGVPVPGFYTELFNSDARQYGGSNMGNLGGKWTEEWSFHEQPYSLDLCLPPLSVLVLKLSQNAEENTVPAEEASNIA

SEQ ID NO: 10015 - protein, 419 aa, Thermobifida fusca YX
MSTTVVLFTRDLRVSDHPALHAAVTEADRVVPLFVVDPALVRVSARNRIAYLLEALAELRGLLRERGGELVVRQGDTVAETVRIVAEAGAQAVYLSADVSAAAVRRARQLTEAVRAAGAHVRTFPGVTVVPPGALRPAHGDHYQIFTPYLNAWRAAQWRSPRPAPERVRLPEGLVPGPLPGAELIRLGTGVLAPQREQGGPRTARERIRAWLAQPNQDSRFGCHLHFGCLSPLEVALVAREHPRGALLLRQLALRDFHHQVLQAFPRLPRADYRPRPIQWRDDDSAFAAWCSGRTGVPIVDAGMRQLLWEGYVPGRIRMLTATYLTQVLRIHWKRGADHFYSLLVDGDVANNYGNWQQIAGTGGVPRPARRINLYRQAERYDPSGDYVRRFVPELRSISGSAVHHPPVPRPGGYPPPLR

SEQ ID NO: 10016 - protein, 404 aa, Vibrio fischeri ES114
MQNIGMSSKLSSVCYDIRGPVLKHAKRMEEEGHKILKLNIGNPAPFGFDAPDEILVDVIKNLPTSQGYCDSKGIYSARKAVVQHYQRRGLLDLDVEDVYIGNGASELIVMAMQALLNNGDEMLVPAPDYPLWTAAVSLSGGKPVHYMCDEGADWYPDLDDIKKKITPNTKGIVLINPNNPTGAVYSRDFLLQVVEIARQNNLIIFADEIYDKVLYDGAVHTTLATLAPDILTVTFNGLSKAYRVCGFRGGWMFLNGPKDHAQGYIAGLDMLASMRLCANVPMQHAIQTALGGYQSINELLLPGGRLLEQRDKAYDLITQIPGVSCVKPKGAMYLFPKLDPKMYKIKDDQKFVLDFLIKEKVLLVQGTGFNWPTPDHFRIVTLPRVDDLETAIGRLERFLHTYKQ

SEQ ID NO: 10017 - protein, 483 aa, Oryza sativa (japonica cultivar-group)
MAAPSVAVDNLNPKVLNCEYAVRGEIVIHAQRLQQQLQTQPGSLPFDEILYCNIGNPQSLGQKPVTFFREVIALCDHPCLLEKEETKSLFSADAISRATTILASIPGRATGAYSHSQGIKGLRDAIAAGIASRDGYPANADDIFLTDGASPGVHMMMQLLIRNEKDGILCPIPQYPLYSASIALHGGALVPYYLNESTGWGLEISDLKKQLEDSRLKGIDVRALVVINPGNPTGQVLAEENQRDIVKFCKNEGLVLLADEVYQENIYVDNKKFNSFKKIARSMGYNEDDLPLVSFQSVSKGYYGECGKRGGYMEITGFSAPVREQIYKVASVNLCSNITGQILASLVMNPPKAGDASYASYKAEKDGILQSLARRAKALENAFNSLEGITCNKTEGAMYLFPQLSLPQKAIDAAKAANKAPDAFYALRLLEATGIVVVPGSGFGQVPGTWHIRCTILPQEEKIPAIISRFKAFHEGFMAAYRD

SEQ ID NO: 10018 - protein, 169 aa, Brassica napus
  misc_feature (166)..(166): Xaa can be any naturally occurring amino acid
MGGTKEDGSGFSRKAMRKEKRAFFFRKWTSVDVMRASSVMAVHLSCVLAPFNYKWEALLFGFLLAAVTNLSITFSYHRNLTHKSFKLPKWLEYPFAYSALFALQGHPIDWVSTHRFHHQFTDSDRDPHSPIEGFWFSHVLWIFDTSYLREKCGARNNVMDLKQQWXYRF

SEQ ID NO: 10019 - protein, 166 aa, Rhodopseudomonas palustris CGA009
MNMRDIIPWGRTNQPATRSFEGDPFLSLHREMNRLFDDVFRGFDLPARAGTLAPFSTGWPKLEITDGDKELKIAAAVPGLEEKDIEVLLDDGTLTIRGEKTSSTEAKDKQFSEHFYGKFERRIPLDVAVAADQVSASFKNGVLTVTLPKAEPSPSTAKRIEIQKTN

SEQ ID NO: 10020 - protein, 1355 aa, Oryza sativa
MGSEAAAARPVVVTVNGERYEAVGVDPSTTLLEFLRTRTPVRGPKLGCGEGGCGACVVVVSKYDAVADEVTEFSASSCLTLLGSLHHCAVTTSEGIGNSRDGFHAVQRRLSGFHASQCGFCTPGMCMSIYSALAKADRCSSRPSPPPGFSKLTAAEAEKAVSGNLCRCTGYRPIVDACKSFAADVDLEDLGLNAFWKKGADDERADVGKLPAYSGGAAVCTFPEFLKSEIRSSMGQANGGAPAVAVTGDGWFHPKSVEEFHRLFDSNLFDERSVKIVASNTGSGVYKDQDLHDKYINISQILELSAINRSSKGVEIGAVVSISKAIEILSDGGAVFRKIADHLSKVASSFVQNTAAIGGNIIMAQRLSFPSDIATVLLAAGSTVTIQVAAKRMCITLEEFLKQPPCDSRTLLVSISIPDWGSDDGITFESFRAAPRPLGNAVSYVNSAFLARSSVDGSSGSHLIEDVCLAFGAFGAEHAIRAREVEEFLKGKLVSAPVILEAVRLLKGVVSPAEGTTHPEYRVSLAVSYLFRFLTSLANGLDEPENANVPNGSCTNGTANGSANSSPEKHSNVDSSDLPIKSRQEMVFSDEYKPVGKPIEKTGAELQASGEAVYVDDIPAPKDCLYGAFIYSTHPHAHIKDINFRSSLASQKVITVITAKDIPTGGENIGSCFPMLGDEALFVHPVSEFAGQNIGVVIAETQKYAYMAAKQAVIEYSTENLQPPILTIEDAVQHNSYFPVPPFLAPTPIGDFNQAMSEADHKIIDGEVKLESQYYFYMETQTALAIPDEDNCITLYVSAQLPEITQNTVARCLGIPYHNVRIITRRVGGGFGGKAMKAIHVAAACAVAAFKLRRPVRMYLDRKTDMIMAGGRHPMKVKYSVGFKSDGKITGLHFDLGMNGGISPDCSPVLPVAIVGALKKYNWGALSFDIKVCKTNVSSKSAMRAPGDAQGSFIAEAIVEHIASTLSVDTNAIRRKNLHDFESLKVFYGNSAGDPSTYSLVTIFDKLASSPEYQQRAAMVEHFNAGNRWKKRGISCVPITYDVRLRPTPGKVSIMNDGSIAVEVGGVEIGQGLWTKVKQMTAFALGQLCDDGGEGLIDKVRVIQADTLSMIQGGFTGGSTTSETSCEAVRKSCAALVERLKPIKEKAGTPPWKSLIAQASMASVKLTEHAYWTPDPTFTSYLNYGAAISEVEVDVLTGETTILRSDLVYDCGQSLNPAVDLGQVEGAFVQGIGFFTNEEYTTNSDGLVINDGTWTYKIPTVDTIPKQFNVELINSARDHKRVLSSKASGEPPLLLASSVHCAMREAIRAARKEFAGAGGSPLTFQMDVPATMPIVKELCGLDVVERYLESFAAKA

SEQ ID NO: 10021 - protein, 444 aa, Arabidopsis thaliana
MVRRQEEEKKAEKGMRLGKYELGRTLGEGNFGKVKFAKDTVSGHSFAVKIIDKSRIADLNFSLQIKREIRTLKMLKHPHIVRLHEVLASKTKINMVMELVTGGELFDRIVSNGKLTETDGRKMFQQLIDGISYCHSKGVFHRDLKLENVLLDAKGHIKITDFGLSALPQHFRDDGLLHTTCGSPNYVAPEVLANRGYDGAASDIWSCGVILYVILTGCLPFDDRNLAVLYQKICKGDPPIPRWLSPGARTMIKRMLDPNPVTRITVVGIKASEWFKLEYIPSIPDDDDEEEVDTDDDAFSIQELGSEEGKGSDSPTIINAFQLIGMSSFLDLSGFFEQENVSERRIRFTSNSSAKDLLEKIETAVTEMGFSVQKKHAKLRVKQEERNQKGQVGLSVTAEVFEIKPSLNVVELRKSYGDSCLYRQLYERLLKDVGTSSPEQEIVT

SEQ ID NO: 10022 - protein, 546 aa, Bdellovibrio bacteriovorus HD100
MSKVITFSEDARTHILKGVNTLANAVKVTLGPKGRNVVIDKSFGSPLITKDGVTVAKEIELENKFENMGAQMVKEVASKTNDEAGDGTTTATVLAQAIYREGAKLVSAGHNPMSIKRGIDKAVGIIIEELKSMSKPVKGSNEVAQVGAISANNDKEIGQMLADAMDKVGREGVITIEESKTAKTEVTVVEGMQFDRGYLSPYFVTNAERMEAVLENAYVLVYDKKISSMKDMIGILEGVAKQGRQLLIIAEDVEGEALATLVVNKLRGTLHIAAVKAPGFGDRRKAMLEDIAILTGAKVISEDVGLKLEAATVADLGVAKRIVVDKDNTTIIDGAGKKNDINGRVGQIKAQIEETSSDYDKEKLKERLAKLAGGVAVIHVGAPSEVEMKEKKHRVEDALNATRAAVEEGIVAGGGTALLRASTKIDKSKFSEEEQFGATIIKRACEEPIRQIAANAGLDGAIVLDRILQNKSTTWGFNAYSDEYTDLIKDGVIDPVKVVRCALTNAASVSSLMLTTETMIAEAPKKESAAPAMPGHDGMGGMGGMM

SEQ ID NO: 10023 - protein, 523 aa, Lycopersicon esculentum
MFKTNNVTARLFERQICTPAPGTSIHRARRFYENVVPSYTIYDVECPDHSFRKFTDDGLYFVSFSRNHQDLVVYRPTWLTFSCKEEDCDTHDLPLKARKFESFFTQLYSVTLASSGELICKDFFLYMESNQFGLFATSTAQIHDAPPTGGAIQGVPSVEKITFHLLRLVDGAILDERVFHNDYVNLAHSIGAFLYDDLLAIVSLRYQRIHILQIRDSGDLVDVRAIGEFCREDDELFLNSNSQVLVNHVGNGFHHSLPQSETSFLSGIKQRLLSYIFRGIWNEADQTMRVQCLKKKFYFHFQDYIDLIIWKVQFLDRHHLLIKFGSVDGGVSRNADIHPSFFAVYNMETTEIVAFYQNSADELYFLFELFSDHFHVSSKSSLHMNFMSSHSNNIHALEQLRCTKNKATNFSQFVKKMMASLPCSCQSQSPSPYFDQSLFRFDEKLISAIDRHRQSTDHPIKFISRRQPNILKFKMKPGPEAGSTDGRTKKICSFLFHPILPLALSVQQTLFLQASVVNIHFRR

SEQ ID NO: 10024 - DNA, 9215 bp, Artificial
  base vector pMON65154
actcaccagtcacagaaaagcatcttacggatggcatgacagtaagagaattatgcagtgctgccataaccatgagtgataacactgcggccaacttacttctgacaacgatcggaggaccgaaggagctaaccgcttttttgcacaacatgggggatcatgtaactcgccttgatcgttgggaaccggagctgaatgaagccataccaaacgacgagcgtgacaccacgatgcctgtagcaatggcaacaacgttgcgcaaactattaactggcgaactacttactctagcttcccggcaacaattaatagactggatggaggcggataaagttgcaggaccacttctgcgctcggcccttccggctggctggtttattgctgataaatctggagccggtgagcgtgggtctcgcggtatcattgcagcactggggccagatggtaagccctcccgtatcgtagttatctacacgacggggagtcaggcaactatggatgaacgaaatagacagatcgctgagataggtgcctcactgattaagcattggtaactgtcagaccaagtttactcatatatactttagattgatttaaaacttcatttttaatttaaaaggatctaggtgaagatcctttttgataatctcatgaccaaaatcccttaacgtgagttttcgttccactgagcgtcagaccccgtagaaaagatcaaaggatcttcttgagatcctttttttctgcgcgtaatctgctgcttgcaaacaaaaaaaccaccgctaccagcggtggtttgtttgccggatcaagagctaccaactctttttccgaaggtaactggcttcagcagagcgcagataccaaatactgtccttctagtgtagccgtagttaggccaccacttcaagaactctgtagcaccgcctacatacctcgctctgctaatcctgttaccagtggctgctgccagtggcgataagtcgtgtcttaccgggttggactcaagacgatagttaccggataaggcgcagcggtcgggctgaacggggggttcgtgcacacagcccagcttggagcgaacgacctacaccgaactgagatacctacagcgtgagctatgagaaagcgccacgcttcccgaagggagaaaggcggacaggtatccggtaagcggcagggtcggaacaggagagcgcacgagggagcttccagggggaaacgcctggtatctttatagtcctgtcgggtttcgccacctctgacttgagcgtcgatttttgtgatgctcgtcaggggggcggagcctatggaaaaacgccagcaacgcggcctttttacggttcctggccttttgctggccttttgctcacatgttctttcctgcgttatcccctgattctgtggataaccgtattaccgcctttgagtgagctgataccgctcgccgcagccgaacgaccgagcgcagcgagtcagtgagcgaggaagcggaagagcgcccaatacgcaaaccgcctctccccgcgcgttggccgattcattaatgcagctggcacgacaggtttcccgactggaaagcgggcagtgagcgcaacgcaattaatgtgagttagctcactcattaggcaccccaggctttacactttatgcttccggctcgtatgttgtgtggaattgtgagcggataacaatttcacacaggaaacagctatgaccatgattacgccaagctcgaaattaaccctcactaaagggaacaaaagctggagctgagtactggcgcgcctgcggccgcctcgaggtcattcatatgcttgagaagagagtcgggatagtccaaaataaaacaaaggtaagattacctggtcaaaagtgaaaacatcagttaaaaggtggtataaagtaaaatatcggtaataaaaggtggcccaaagtgaaatttactcttttctactattataaaaattgaggatgtttttgtcggtactttgatacgtcatttttgtatgaattggtttttaagtttattcgcttttggaaatgcatatctgtatttgagtcgggttttaagttcgtttgcttttgtaaatacagagggatttgtataagaaatatctttaaaaaaacccatatgctaatttgacataatttttgagaaaaatatatattcaggcgaattctcacaatgaacaataataagattaaaatagctttcccccgttgcagcgcatgggtattttttctagtaaaaataaaagataaacttagactcaaaacatttacaaaaacaacccctaaagttcctaaagcccaaagtgctatccacgatccattagcaaggcccagcccaacccaacccaacccaacccaccccagtccagccaactggacaatagtctccacccccggcactatcaccgtgagttgtccgcaccaccgcacgtctcgcagccaaaaaaaaaaaaagaaagaaaaaaaagaaaaagaaaaacagcaggtgggtccgggtcgtgggggccggaaaagcgaggaggatcgcgagcagcgacgaggcccggccctccctccgcttccaaagaaacgccccccatcgccactatatacatacccccccctctcctcccatccccccaaccctaccaccaccaccaccaccacctcctcccccctcgctgccggacgacgagctcctcccccctccccctccgccgccgccggtaaccaccccgcccctctcctctttctttctccgttttttttttcgtctcggtctcgatctttggccttggtagtttgggtgggcgagagcggcttcgtcgcccagatcggtgcgcgggaggggcgggatctcgcggctggcgtctccgggcgtgagtcggcccggatcctcgcggggaatggggctctcggatgtagatctgatccgccgttgttgggggagatgatggggggtttaaaatttccgccatgctaaacaagatcaggaagaggggaaaagggcactatggtttatatttttatatatttctgctgcttcgtcaggcttagatgtgctagatctttctttcttctttttgtgggtagaatttgaatccctcagcattgttcatcggtagtttttcttttcatgatttgtgacaaatgcagcctcgtgcggagcttttttgtaggtagaccgcgggatatcacaagtttgtacaaaaaagctgaacgagaaacgtaaaatgatataaatatcaatatattaaattagattttgcataaaaaacagactacataatactgtaaaacacaacatatccagtcactatggcggccgcattaggcaccccaggctttacactttatgcttccggctcgtataatgtgtggattttgagttaggatccgtcgagattttcaggagctaaggaagctaaaatggagaaaaaaatcactggatataccaccgttgatatatcccaatggcatcgtaaagaacattttgaggcatttcagtcagttgctcaatgtacctataaccagaccgttcagctggatattacggcctttttaaagaccgtaaagaaaaataagcacaagttttatccggcctttattcacattcttgcccgcctgatgaatgctcatccggaattccgtatggcaatgaaagacggtgagctggtgatatgggatagtgttcacccttgttacaccgttttccatgagcaaactgaaacgttttcatcgctctggagtgaataccacgacgatttccggcagtttctacacatatattcgcaagatgtggcgtgttacggtgaaaacctggcctatttccctaaagggtttattgagaatatgtttttcgtctcagccaatccctgggtgagtttcaccagttttgatttaaacgtggccaatatggacaacttcttcgcccccgttttcaccatgggcaaatattatacccaaggcgacaaggtgctgatgccgctggcgattcaggttcatcatgccgtctgtgatggcttccatgtcggcagaatgcttaatgaattacaacagtactgcgatgagtggcagggcggggcgtaaacgcgtggatccggcttactaaaagccagataacagtatgcgtatttgcgcgctgatttttgcggtataagaatatatactgatatgtatacccgaagtatgtcaaaaagaggtgtgctatgaagcagcgtattacagtgacagttgacagcgacagctatcagttgctcaaggcatatatgatgtcaatatctccggtctggtaagcacaaccatgcagaatgaagcccgtcgtctgcgtgccgaacgctggaaagcggaaaatcaggaagggatggctgaggtcgcccggtttattgaaatgaacggctcttttgctgacgagaacaggggctggtgaaatgcagtttaaggtttacacctataaaagagagagccgttatcgtctgtttgtggatgtacagagtgatattattgacacgcccgggcgacggatggtgatccccctggccagtgcacgtctgctgtcagataaagtctcccgtgaactttacccggtggtgcatatcggggatgaaagctggcgcatgatgaccaccgatatggccagtgtgccggtctccgttatcggggaagaagtggctgatctcagccaccgcgaaaatgacatcaaaaacgccattaacctgatgttctggggaatataaatgtcaggctcccttatacacagccagtctgcaggtcgaccatagtgactggatatgttgtgttttacagtattatgtagtctgttttttatgcaaaatctaatttaatatattgatatttatatcattttacgtttctcgttcagctttcttgtacaaagtggtgatggggatcccccaccctgcaatgtgaccctagacttgtccatcttcggatggccaacttaattaatgtataaataaaaggatgcacacatagtgacatgctaatcactataatgtgggcatcaaagttgtgtgttatgtgtaattactaattatctgaataagagaaagagatcatccatatttcttatcctaaatgaatgtcacgtgtctttataattctttgatgaaccagatgcattttattaaccaattccatatacatataaatattaatcatatataattaatatcaattgggttagcaaaacaaatctagtctaggtgtgttttgctaattattgggggatagtgcaaaaagaaatctacgttctcaataattcagatagaaaacttaataaagtgagataatttacatagattgcttttatcctttgatatatgtgaaaccatgcatgatataaggaaaatagatagagaaataattttttacatcgttgaatatgtaaacaatttaattcaagaagctaggaatataaatattgaggagtttatgattattattattattttgatgttcaatgaagttttttttaatttcatatgaagtatacaaaaattcttcatagatttttgtttctatgccgtagttatctttaatatatttgtggttgaagaaatttattgctagaaacgaatggattgtcaatttttttttaaagcaaatatatatgaaattatactgtatattattttagtcatgattaaaatgtggccttaattgaatcatctttctcattcattttttcaaaagcatatcaggatgattgatatttatctattttaaaaattaatttaagggttcaaattaaatttaacttaaaagtgtcctaaccgtagttaaaggtttactttaaaaaaatactatgaaaaatctaatcttctatgaatcgacctgcaggatttaaatccatcgttctggggcctaacgggccaagctttccgatcctacctgtcacttcatcaaaaggacagtagaaaaggaaggtggcacctacaaatgccatcattgcgataaaggaaaggctatcattcaagatgcctctgccgacagtggtcccaaagatggacccccacccacgaggagcatcgtggaaaaagaagacgttccaaccacgtcttcaaagcaagtggattgatgtgatacttccactgacgtaagggatgacgcacaatcccactatccttcgcaagacccttcctctatataaggaagttcatttcatttggagaggacacgctgaaatcaccagtctctctctacaagatcggggatctctagctagacgatcgtttcgcatgattgaacaagatggattgcacgcaggttctccggccgcttgggtggagaggctattcggctatgactgggcacaacagacaatcggctgctctgatgccgccgtgttccggctgtcagcgcaggggcgcccggttctttttgtcaagaccgacctgtccggtgccctgaatgaactgcaggacgaggcagcgcggctatcgtggctggccacgacgggcgttccttgcgcagctgtgctcgacgttgtcactgaagcgggaagggactggctgctattgggcgaagtgccggggcaggatctcctgtcatctcaccttgctcctgccgagaaagtatccatcatggctgatgcaatgcggcggctgcatacgcttgatccggctacctgcccattcgaccaccaagcgaaacatcgcatcgagcgagcacgtactcggatggaagccggtcttgtcgatcaggatgatctggacgaagagcatcaggggctcgcgccagccgaactgttcgccaggctcaaggcgcgcatgcccgacggcgaggatctcgtcgtgacccatggcgatgcctgcttgccgaatatcatggtggaaaatggccgcttttctggattcatcgactgtggccggctgggtgtggcggaccgctatcaggacatagcgttggctacccgtgatattgctgaagagcttggcggcgaatgggctgaccgcttcctcgtgctttacggtatcgccgctcccgattcgcagcgcatcgccttctatcgccttcttgacgagttcttctgagcgggactctggggttcgaagaattcccgatcgttcaaacatttggcaataaagtttcttaagattgaatcctgttgccggtcttgcgatgattatcatataatttctgttgaattacgttaagcatgtaataattaacatgtaatgcatgacgttatttatgagatgggtttttatgattagagtcccgcaattatacatttaatacgcgatagaaaacaaaatatagcgcgcaaactaggataaattatcgcgcgcggtgtcatctatgttactagatcggggatatcgcgtgtctttataattctttgatgaaccagatgcattttattaaccaattccatatacatataaatattaatcatatataattaatatcaattgggttagcaaaacaaatctagtctaggtgtgttttgctaattattgggggatagtgcaaaaagaaatctacgttctcaataattcagatagaaaacttaataaagtgagataatttacatagattgcttttatcctttgatatatgtgaaaccatgcatgatataaggaaaatagatagagaaataattttttacatcgttgaatatgtaaacaatttaattcaagaagctaggaatataaatattgaggagtttatgattattattattattttgatgttcaatgaagttttttttaatttcatatgaagtatacaaaaattcttcatagatttttgtttctatgccgtagttatctttaatatatttgtggttgaagaaatttattgctagaaacgaatggattgtcaatttttttttaaagcaaatatatatgaaattatactgtatattattttagtcatgattaaaatgtggccttaattgaatcatctttctcattcattttttcaaaagcatatcaggatgattgatatttatctattttaaaaattaatttaagggttcaaattaaatttaacttaaaagtgtcctaaccgtagttaaaggtttactttaaaaaaatactatgaaaaatctaatcttctatgaatcgaccgctgatcgatcgcggccgctggcgcgccagtactagctagtacccaattcgccctatagtgagtcgtattacaattcactggccgtcgttttacaacgtcgtgactgggaaaaccctggcgttacccaacttaatcgccttgcagcacatccccctttcgccagctggcgtaatagcgaagaggcccgcaccgatcgcccttcccaacagttgcgcagcctgaatggcgaatggaaattgtaagcgttaatattttgttaaaattcgcgttaaatttttgttaaatcagctcattttttaaccaataggccgaaatcggcaaaatcccttataaatcaaaagaatagaccgagatagggttgagtgttgttccagtttggaacaagagtccactattaaagaacgtggactccaacgtcaaagggcgaaaaaccgtctatcagggcgatggcccactacgtgaaccatcaccctaatcaagttttttggggtcgaggtgccgtaaagcactaaatcggaaccctaaagggagcccccgatttagagcttgacggggaaagccggcgaacgtggcgagaaaggaagggaagaaagcgaaaggagcgggcgctagggcgctggcaagtgtagcggtcacgctgcgcgtaaccaccacacccgccgcgcttaatgcgccgctacagggcgcgtcaggtggcacttttcggggaaatgtgcgcggaacccctatttgtttatttttctaaatacattcaaatatgtatccgctcatgagacaataaccctgataaatgcttcaataatattgaaaaaggaagagtatgagtattcaacatttccgtgtcgcccttattcccttttttgcggcattttgccttcctgtttttgctcacccagaaacgctggtgaaagtaaaagatgctgaagatcagttgggtgcacgagtgggttacatcgaactggatctcaacagcggtaagatccttgagagttttcgccccgaagaacgttttccaatgatgagcacttttaaagttctgctatgtggcgcggtattatcccgtattgacgccgggcaagagcaactcggtcgccgcatacactattctcagaatgacttggttgagt

SEQ ID NO: 10025 - DNA, 9747 bp, Artificial
  base vector pMON72472
ccgatcctacctgtcacttcatcaaaaggacagtagaaaaggaaggtggcacctacaaatgccatcattgcgataaaggaaaggctatcattcaagatgcctctgccgacagtggtcccaaagatggacccccacccacgaggagcatcgtggaaaaagaagacgttccaaccacgtcttcaaagcaagtggattgatgtgatacttccactgacgtaagggatgacgcacaatcccactatccttcgcaagacccttcctctatataaggaagttcatttcatttggagaggacacgctgaaatcaccagtctctctctacaagatcggggatctctagctagacgatcgtttcgcatgattgaacaagatggattgcacgcaggttctccggccgcttgggtggagaggctattcggctatgactgggcacaacagacaatcggctgctctgatgccgccgtgttccggctgtcagcgcaggggcgcccggttctttttgtcaagaccgacctgtccggtgccctgaatgaactgcaggacgaggcagcgcggctatcgtggctggccacgacgggcgttccttgcgcagctgtgctcgacgttgtcactgaagcgggaagggactggctgctattgggcgaagtgccggggcaggatctcctgtcatctcaccttgctcctgccgagaaagtatccatcatggctgatgcaatgcggcggctgcatacgcttgatccggctacctgcccattcgaccaccaagcgaaacatcgcatcgagcgagcacgtactcggatggaagccggtcttgtcgatcaggatgatctggacgaagagcatcaggggctcgcgccagccgaactgttcgccaggctcaaggcgcgcatgcccgacggcgaggatctcgtcgtgacccatggcgatgcctgcttgccgaatatcatggtggaaaatggccgcttttctggattcatcgactgtggccggctgggtgtggcggaccgctatcaggacatagcgttggctacccgtgatattgctgaagagcttggcggcgaatgggctgaccgcttcctcgtgctttacggtatcgccgctcccgattcgcagcgcatcgccttctatcgccttcttgacgagttcttctgagcgggactctggggttcgaagaattcccgatcgttcaaacatttggcaataaagtttcttaagattgaatcctgttgccggtcttgcgatgattatcatataatttctgttgaattacgttaagcatgtaataattaacatgtaatgcatgacgttatttatgagatgggtttttatgattagagtcccgcaattatacatttaatacgcgatagaaaacaaaatatagcgcgcaaactaggataaattatcgcgcgcggtgtcatctatgttactagatcggggatatcgcgtgtctttataattctttgatgaaccagatgcattttattaaccaattccatatacatataaatattaatcatatataattaatatcaattgggttagcaaaacaaatctagtctaggtgtgttttgctaattattgggggatagtgcaaaaagaaatctacgttctcaataattcagatagaaaacttaataaagtgagataatttacatagattgcttttatcctttgatatatgtgaaaccatgcatgatataaggaaaatagatagagaaataattttttacatcgttgaatatgtaaacaatttaattcaagaagctaggaatataaatattgaggagtttatgattattattattattttgatgttcaatgaagttttttttaatttcatatgaagtatacaaaaattcttcatagatttttgtttctatgccgtagttatctttaatatatttgtggttgaagaaatttattgctagaaacgaatggattgtcaatttttttttaaagcaaatatatatgaaattatactgtatattattttagtcatgattaaaatgtggccttaattgaatcatctttctcattcattttttcaaaagcatatcaggatgattgatatttatctattttaaaaattaatttaagggttcaaattaaatttaacttaaaagtgtcctaaccgtagttaaaggtttactttaaaaaaatactatgaaaaatctaatcttctatgaatcgaccgctgatcgatcgcggccgctggcgcgccctcgagaggcctcatctaagcccccatttggacgtgaatgtagacacgtcgaaataaagatttccgaattagaataatttgtttattgctttcgcctataaatacgacggatcgtaatttgtcgttttatcaaaatgtactttcattttataataacgctgcggacatctacatttttgaattgaaaaaaaattggtaattactctttctttttctccatattgaccatcatactcattgctgatccatgtagatttcccggacatgaagccatttacaattgaatatatcctgccgccgctgccgctttgcacccggtggagcttgcatgttggtttctacgcagaactgagccggttaggcagataatttccattgagaactgagccatgtgcaccttccccccaacacggtgagcgacggggcaacggagtgatccacatgggacttttcctagcttggctgccatttttggggtgaggccgttcgcggccgaggggcgcagcccctggggggatgggaggcccgcgttagcgggccgggagggttcgagaagggggggcaccccccttcggcgtgcgcggtcacgcgcacagggcgcagccctggttaaaaacaaggtttataaatattggtttaaaagcaggttaaaagacaggttagcggtggccgaaaaacgggcggaaacccttgcaaatgctggattttctgcctgtggacagcccctcaaatgtcaataggtgcgcccctcatctgtcagcactctgcccctcaagtgtcaaggatcgcgcccctcatctgtcagtagtcgcgcccctcaagtgtcaataccgcagggcacttatccccaggcttgtccacatcatctgtgggaaactcgcgtaaaatcaggcgttttcgccgatttgcgaggctggccagctccacgtcgccggccgaaatcgagcctgcccctcatctgtcaacgccgcgccgggtgagtcggcccctcaagtgtcaacgtccgcccctcatctgtcagtgagggccaagttttccgcgaggtatccacaacgccggcggccggccgcggtgtctcgcacacggcttcgacggcgtttctggcgcgtttgcagggccatagacggccgccagcccagcggcgagggcaaccagcccggtgagcgtcggaaagggtcgatcgaccgatgcccttgagagccttcaacccagtcagctccttccggtgggcgcggggcatgactacggtatcagctcactcaaaggcggtaatacggttatccacagaatcaggggataacgcaggaaagaacatgtgagcaaaaggccagcaaaaggccaggaaccgtaaaaaggccgcgttgctggcgtttttccataggctccgcccccctgacgagcatcacaaaaatcgacgctcaagtcagaggtggcgaaacccgacaggactataaagataccaggcgtttccccctggaagctccctcgtgcgctctcctgttccgaccctgccgcttaccggatacctgtccgcctttctcccttcgggaagcgtggcgctttctcatagctcacgctgtaggtatctcagttcggtgtaggtcgttcgctccaagctgggctgtgtgcacgaaccccccgttcagcccgaccgctgcgccttatccggtaactatcgtcttgagtccaacccggtaagacacgacttatcgccactggcagcagccactggtaacaggattagcagagcgaggtatgtaggcggtgctacagagttcttgaagtggtggcctaactacggctacactagaagaacagtatttggtatctgcgctctgctgaagccagttaccttcggaaaaagagttggtagctcttgatccggcaaacaaaccaccgctggtagcggtggtttttttgtttgcaagcagcagattacgcgcagaaaaaaaggatctcaagaagatcctttgatcttttctacggggtctgacgctcagtggaacgaaaactcacgttaagggattttggtcatgagggaagcggtgatcgccgaagtatcgactcaactatcagaggtagttggcgtcatcgagcgccatctcgaaccgacgttgctggccgtacatttgtacggctccgcagtggatggcggcctgaagccacacagtgatattgatttgctggttacggtgaccgtaaggcttgatgaaacaacgcggcgagctttgatcaacgaccttttggaaacttcggcttcccctggagagagcgagattctccgcgctgtagaagtcaccattgttgtgcacgacgacatcattccgtggcgttatccagctaagcgcgaactgcaatttggagaatggcagcgcaatgacattcttgcaggtatcttcgagccagccacgatcgacattgatctggctatcttgctgacaaaagcaagagaacatagcgttgccttggtaggtccagcggcggaggaactctttgatccggttcctgaacaggatctatttgaggcgctaaatgaaaccttaacgctatggaactcgccgcccgactgggctggcgatgagcgaaatgtagtgcttacgttgtcccgcatttggtacagcgcagtaaccggcaaaatcgcgccgaaggatgtcgctgccgactgggcaatggagcgcctgccggcccagtatcagcccgtcatacttgaagctaggcaggcttatcttggacaagaagatcgcttggcctcgcgcgcagatcagttggaagaatttgttcactacgtgaaaggcgagatcaccaaggtagtcggcaaataatgtctaacaattcgttcaagccgacgccgcttcgcggcgcggcttaactcaagcgttagatgctgcaggcatcgtggtgtcacgctcgtcgtttggtatggcttcattcagctccggttcccaacgatcaaggcgagttacatgatcccccatgttgtgcaaaaaagcggttagctccttcggtcctccgatcgaggatttttcggcgctgcgctacgtccgcgaccgcgttgagggatcaagccacagcagcccactcgaccttctagccgacccagacgagccaagggatctttttggaatgctgctccgtcgtcaggctttccgacgtttgggtggttgaacagaagtcattatcgcacggaatgccaagcactcccgaggggaaccctgtggttggcatgcacatacaaatggacgaacggataaaccttttcacgcccttttaaatatccgattattctaataaacgctcttttctcttaggtttacccgccaatatatcctgtcaaacactgatagtttaaacatgactctcttaaggtagccaaagccccggaattcggcgcgcctgcggccgcctcgaggtcattcatatgcttgagaagagagtcgggatagtccaaaataaaacaaaggtaagattacctggtcaaaagtgaaaacatcagttaaaaggtggtataaagtaaaatatcggtaataaaaggtggcccaaagtgaaatttactcttttctactattataaaaattgaggatgtttttgtcggtactttgatacgtcatttttgtatgaattggtttttaagtttattcgcttttggaaatgcatatctgtatttgagtcgggttttaagttcgtttgcttttgtaaatacagagggatttgtataagaaatatctttaaaaaaacccatatgctaatttgacataatttttgagaaaaatatatattcaggcgaattctcacaatgaacaataataagattaaaatagctttcccccgttgcagcgcatgggtattttttctagtaaaaataaaagataaacttagactcaaaacatttacaaaaacaacccctaaagttcctaaagcccaaagtgctatccacgatccatagcaagcccagcccaacccaacccaacccaacccaccccagtccagccaactggacaatagtctccacacccccccactatcaccgtgagttgtccgcacgcaccgcacgtctcgcagccaaaaaaaaaaaaagaaagaaaaaaaagaaaaagaaaaaacagcaggtgggtccgggtcgtgggggccggaaacgcgaggaggatcgcgagccagcgacgaggccggccctccctccgcttccaaagaaacgccccccatcgccactatatacatacccccccctctcctcccatccccccaaccctaccaccaccaccaccaccacctccacctcctcccccctcgctgccggacgacgagctcctcccccctccccctccgccgccgccgcgccggtaaccaccccgcccctctcctctttctttctccgttttttttttccgtctcggtctcgatctttggccttggtagtttgggtgggcgagaggcggcttcgtgcgcgcccagatcggtgcgcgggaggggcgggatctcgcggctggggctctcgccggcgtggatccggcccggatctcgcggggaatggggctctcggatgtagatctgcgatccgccgttgttgggggagatgatggggggtttaaaatttccgccatgctaaacaagatcaggaagaggggaaaagggcactatggtttatatttttatatatttctgctgcttcgtcaggcttagatgtgctagatctttctttcttctttttgtgggtagaatttgaatccctcagcattgttcatcggtagtttttcttttcatgatttgtgacaaatgcagcctcgtgcggagcttttttgtaggtagaccgcgggatatcacaagtttgtacaaaaaagctgaacgagaaacgtaaaatgatataaatatcaatatattaaattagattttgcataaaaaacagactacataatactgtaaaacacaacatatccagtcactatggcggccgcattaggcaccccaggctttacactttatgcttccggctcgtataatgtgtggattttgagttaggatccgtcgagattttcaggagctaaggaagctaaaatggagaaaaaaatcactggatataccaccgttgatatatcccaatggcatcgtaaagaacattttgaggcatttcagtcagttgctcaatgtacctataaccagaccgttcagctggatattacggcctttttaaagaccgtaaagaaaaataagcacaagttttatccggcctttattcacattcttgcccgcctgatgaatgctcatccggaattccgtatggcaatgaaagacggtgagctggtgatatgggatagtgttcacccttgttacaccgttttccatgagcaaactgaaacgttttcatcgctctggagtgaataccacgacgatttccggcagtttctacacatatattcgcaagatgtggcgtgttacggtgaaaacctggcctatttccctaaagggtttattgagaatatgtttttcgtctcagccaatccctgggtgagtttcaccagttttgatttaaacgtggccaatatggacaacttcttcgcccccgttttcaccatgggcaaatattatacgcaaggcgacaaggtgctgatgccgctggcgattcaggttcatcatgccgtttgtgatggcttccatgtcggcagaatgcttaatgaattacaacagtactgcgatgagtggcagggcggggcgtaaacgcgtggatccggcttactaaaagccagataacagtatgcgtatttgcgcgctgatttttgcggtataagaatatatactgatatgtatacccgaagtatgtcaaaaagaggtatgctatgaagcagcgtattacagtgacagttgacagcgacagctatcagttgctcaaggcatatatgatgtcaatatctccggtctggtaagcacaaccatgcagaatgaagcccgtcgtctgcgtgccgaacgctggaaagcggaaaatcaggaagggatggctgaggtcgcccggtttattgaaatgaacggctcttttgctgacgagaacaggggctggtgaaatgcagtttaaggtttacacctataaaagagagagccgttatcgtctgtttgtggatgtacagagtgatattattgacacgcccgggcgacggatggtgatccccctggccagtgcacgtctgctgtcagataaagtctcccgtgaactttacccggtggtgcatatcggggatgaaagctggcgcatgatgaccaccgatatggccagtgtgccggtctccgttatcggggaagaagtggctgatctcagccaccgcgaaaatgacatcaaaaacgccattaacctgatgttctggggaatataaatgtcaggctcccttatacacagccagtctgcaggtcgaccatagtgactggatatgttgtgttttacagtattatgtagtctgttttttatgcaaaatctaatttaatatattgatatttatatcattttacgtttctcgttcagctttcttgtacaaagtggtgatggggatcccccaccctgcaatgtgaccctagacttgtccatcttctggattggccaacttaattaatgtatgaaataaaaggatgcacacatagtgacatgctaatcactataatgtgggcatcaaagttgtgtgttatgtgtaattactaattatctgaataagagaaagagatcatccatatttcttatcctaaatgaatgtcacgtgtctttataattctttgatgaaccagatgcattttattaaccaattccatatacatataaatattaatcatatataattaatatcaattgggttagcaaaacaaatctagtctaggtgtgttttgctaattattgggggatagtgcaaaaagaaatctacgttctcaataattcagatagaaaacttaataaagtgagataatttacatagattgcttttatcctttgatatatgtgaaaccatgcatgatataaggaaaatagatagagaaataattttttacatcgttgaatatgtaaacaatttaattcaagaagctaggaatataaatattgaggagtttatgattattattattattttgatgttcaatgaagttttttttaatttcatatgaagtatacaaaaattcttcatagatttttgtttctatgccgtagttatctttaatatatttgtggttgaagaaatttattgctagaaacgaatggattgtcaatttttttttaaagcaaatatatatgaaattatactgtatattattttagtcatgattaaaatgtggccttaattgaatcatctttctcattcattttttcaaaagcatatcaggatgattgatatttatctattttaaaaattaatttaagggttcaaattaaatttaacttaaaagtgtcctaaccgtagttaaaggtttactttaaaaaaatactatgaaaaatctaatcttctatgaatcgacctgcaggatttaaatccatcgttctggggcctaacgggccaagcttt

SEQ ID NO: 10026 - DNA, 10289 bp, Artificial
  base vector pMON82060
cgcgccttaattaagcggccgcatcgatcgtgaagtttctcatctaagcccccatttggacgtgaatgtagacacgtcgaaataaagatttccgaattagaataatttgtttattgctttcgcctataaatacgacggatcgtaatttgtcgttttatcaaaatgtactttcattttataataacgctgcggacatctacatttttgaattgaaaaaaaattggtaattactctttctttttctccatattgaccatcatactcattgctgatccatgtagatttcccggacatgaagccatttacaattgaatatatcctgccgccgctgccgctttgcacccggtggagcttgcatgttggtttctacgcagaactgagccggttaggcagataatttccattgagaactgagccatgtgcaccttccccccaacacggtgagcgacggggcaacggagtgatccacatgggacttttcctagcttggctgccatttttggggtgaggccgttcgcggccgaggggcgcagcccctggggggatgggaggcccgcgttagcgggccgggagggttcgagaagggggggcaccccccttcggcgtgcgcggtcacgcgcacagggcgcagccctggttaaaaacaaggtttataaatattggtttaaaagcaggttaaaagacaggttagcggtggccgaaaaacgggcggaaacccttgcaaatgctggattttctgcctgtggacagcccctcaaatgtcaataggtgcgcccctcatctgtcagcactctgcccctcaagtgtcaaggatcgcgcccctcatctgtcagtagtcgcgcccctcaagtgtcaataccgcagggcacttatccccaggcttgtccacatcatctgtgggaaactcgcgtaaaatcaggcgttttcgccgatttgcgaggctggccagctccacgtcgccggccgaaatcgagcctgcccctcatctgtcaacgccgcgccgggtgagtcggcccctcaagtgtcaacgtccgcccctcatctgtcagtgagggccaagttttccgcgaggtatccacaacgccggcggccggccgcggtgtctcgcacacggcttcgacggcgtttctggcgcgtttgcagggccatagacggccgccagcccagcggcgagggcaaccagcccggtgagcgtcggaaagggtcgatcgaccgatgcccttgagagccttcaacccagtcagctccttccggtgggcgcggggcatgactatcgtcgccgcacttatgactgtcttctttatcatgcaactcgtaggacaggtgccggcagcgctctgggtcattttcggcgaggaccgctttcgctggagcgcgacgatgatcggcctgtcgcttgcggtattcggaatcttgcacgccctcgctcaagccttcgtcactggtcccgccaccaaacgtttcggcgagaagcaggccattatcgccggcatggcggccgacgcgctgggctacgtcttgctggcgttcgcgacgcgaggctggatggccttccccattatgattcttctcgcttccggcggcatcgggatgcccgcgttgcaggccatgctgtccaggcaggtagatgacgaccatcagggacagcttcaaggatcgctcgcggctcttaccagcctaacttcgatcattggaccgctgatcgtcacggcgatttatgccgcctcggcgagcacatggaacgggttggcatggattgtaggcgccgccctataccttgtctgcctccccgcgttgcgtcgcggtgcatggagccgggccacctcgacctgaatggaagccggcggcacctcgctaacggattcaccactccaagaattggagccaatcaattcttgcggagaactgtgaatgcgcaaaccaacccttggcagaacatatccatcgcgtccgccatctccagcagccgcacgcggcgcatctcgggcagcgttgggtcctggccacgggtgcgcatgatcgtgctcctgtcgttgaggacccggctaggctggcggggttgccttactggttagcagaatgaatcaccgatacgcgagcgaacgtgaagcgactgctgctgcaaaacgtctgcgacctgagcaacaacatgaatggtcttcggtttccgtgtttcgtaaagtctggaaacgcggaagtcagcgccctgcaccattatgttccggatctgcatcgcaggatgctgctggctaccctgtggaacacctacatctgtattaacgaagcgctggcattgaccctgagtgatttttctctggtcccgccgcatccataccgccagttgtttaccctcacaacgttccagtaaccgggcatgttcatcatcagtaacccgtatcgtgagcatcctctctcgtttcatcggtatcattacccccatgaacagaaatcccccttacacggaggcatcagtgaccaaacaggaaaaaaccgcccttaacatggcccgctttatcagaagccagacattaacgcttctggagaaactcaacgagctggacgcggatgaacaggcagacatctgtgaatcgcttcacgaccacgctgatgagctttaccgcagctgcctcgcgcgtttcggtgatgacggtgaaaacctctgacacatgcagctcccggagacggtcacagcttgtctgtaagcggatgccgggagcagacaagcccgtcagggcgcgtcagcgggtgttggcgggtgtcggggcgcagccatgacccagtcacgtagcgatagcggagtgtatactggcttaactatgcggcatcagagcagattgtactgagagtgcaccatatgcggtgtgaaataccgcacagatgcgtaaggagaaaataccgcatcaggcgctcttccgcttcctcgctcactgactcgctgcgctcggtcgttcggctgcggcgagcggtatcagctcactcaaaggcggtaatacggttatccacagaatcaggggataacgcaggaaagaacatgtgagcaaaaggccagcaaaaggccaggaaccgtaaaaaggccgcgttgctggcgtttttccataggctccgcccccctgacgagcatcacaaaaatcgacgctcaagtcagaggtggcgaaacccgacaggactataaagataccaggcgtttccccctggaagctccctcgtgcgctctcctgttccgaccctgccgcttaccggatacctgtccgcctttctcccttcgggaagcgtggcgctttctcatagctcacgctgtaggtatctcagttcggtgtaggtcgttcgctccaagctgggctgtgtgcacgaaccccccgttcagcccgaccgctgcgccttatccggtaactatcgtcttgagtccaacccggtaagacacgacttatcgccactggcagcagccactggtaacaggattagcagagcgaggtatgtaggcggtgctacagagttcttgaagtggtggcctaactacggctacactagaaggacagtatttggtatctgcgctctgctgaagccagttaccttcggaaaaagagttggtagctcttgatccggcaaacaaaccaccgctggtagcggtggtttttttgtttgcaagcagcagattacgcgcagaaaaaaaggatctcaagaagatcctttgatcttttctacggggtctgacgctcagtggaacgaaaactcacgttaagggattttggtcatgagattatcaaaaaggatcttcacctagatccttttaaattaaaaatgaagttttaaatcaatctaaagtatatatgagtaaacttggtctgacagttaccaatgcttaatcagtgaggcacctatctcagcgatctgtctatttcgttcatccatagttgcctgactccccgtcgtgtagataactacgatacgggagggcttaccatctggccccagtgctgcaatgataccgcgagacccacgctcaccggctccagatttatcagcaataaaccagccagccggaagggccgagcgcagaagtggtcctgcaactttatccgcctccatccagtctattaattgttgccgggaagctagagtaagtagttcgccagttaatagtttgcgcaacgttgttgccattgctgcaggtcgggagcacaggatgacgcctaacaattcattcaagccgacaccgcttcgcggcgcggcttaattcaggagttaaacatcatgagggaagcggtgatcgccgaagtatcgactcaactatcagaggtagttggcgtcatcgagcgccatctcgaaccgacgttgctggccgtacatttgtacggctccgcagtggatggcggcctgaagccacacagtgatattgatttgctggttacggtgaccgtaaggcttgatgaaacaacgcggcgagctttgatcaacgaccttttggaaacttcggcttcccctggagagagcgagattctccgcgctgtagaagtcaccattgttgtgcacgacgacatcattccgtggcgttatccagctaagcgcgaactgcaatttggagaatggcagcgcaatgacattcttgcaggtatcttcgagccagccacgatcgacattgatctggctatcttgctgacaaaagcaagagaacatagcgttgccttggtaggtccagcggcggaggaactctttgatccggttcctgaacaggatctatttgaggcgctaaatgaaaccttaacgctatggaactcgccgcccgactgggctggcgatgagcgaaatgtagtgcttacgttgtcccgcatttggtacagcgcagtaaccggcaaaatcgcgccgaaggatgtcgctgccgactgggcaatggagcgcctgccggcccagtatcagcccgtcatacttgaagctaggcaggcttatcttggacaagaagatcgcttggcctcgcgcgcagatcagttggaagaatttgttcactacgtgaaaggcgagatcaccaaggtagtcggcaaataatgtctaacaattcgttcaagccgacgccgcttcgcggcgcggcttaactcaagcgttagatgctgcaggcatcgtggtgtcacgctcgtcgtttggtatggcttcattcagctccggttcccaacgatcaaggcgagttacatgatcccccatgttgtgcaaaaaagcggttagctccttcggtcctccgatcgaggatttttcggcgctgcgctacgtccgcgaccgcgttgagggatcaagccacagcagcccactcgaccttctagccgacccagacgagccaagggatctttttggaatgctgctccgtcgtcaggctttccgacgtttgggtggttgaacagaagtcattatcgcacggaatgccaagcactcccgaggggaaccctgtggttggcatgcacatacaaatggacgaacggataaaccttttcacgcccttttaaatatccgattattctaataaacgctcttttctcttaggtttacccgccaatatatcctgtcaaacactgatagtttaaactgaaggcgggaaacgacaatctggcgcgcctgcggccgcctcgaggtcattcatatgcttgagaagagagtcgggatagtccaaaataaaacaaaggtaagattacctggtcaaaagtgaaaacatcagttaaaaggtggtataaagtaaaatatcggtaataaaaggtggcccaaagtgaaatttactcttttctactattataaaaattgaggatgtttttgtcggtactttgatacgtcatttttgtatgaattggtttttaagtttattcgcttttggaaatgcatatctgtatttgagtcgggttttaagttcgtttgcttttgtaaatacagagggatttgtataagaaatatctttaaaaaaacccatatgctaatttgacataatttttgagaaaaatatatattcaggcgaattctcacaatgaacaataataagattaaaatagctttcccccgttgcagcgcatgggtattttttctagtaaaaataaaagataaacttagactcaaaacatttacaaaaacaacccctaaagttcctaaagcccaaagtgctatccacgatccatagcaagcccagcccaacccaacccaacccaacccaccccagtccagccaactggacaatagtctccacacccccccactatcaccgtgagttgtccgcacgcaccgcacgtctcgcagccaaaaaaaaaaaaagaaagaaaaaaaagaaaaagaaaaaacagcaggtgggtccgggtcgtgggggccggaaacgcgaggaggatcgcgagccagcgacgaggccggccctccctccgcttccaaagaaacgccccccatcgccactatatacatacccccccctctcctcccatccccccaaccctaccaccaccaccaccaccacctccacctcctcccccctcgctgccggacgacgagctcctcccccctccccctccgccgccgccgcgccggtaaccaccccgcccctctcctctttctttctccgttttttttttccgtctcggtctcgatctttggccttggtagtttgggtgggcgagaggcggcttcgtgcgcgcccagatcggtgcgcgggaggggcgggatctcgcggctggggctctcgccggcgtggatccggcccggatctcgcggggaatggggctctcggatgtagatctgcgatccgccgttgttgggggagatgatggggggtttaaaatttccgccatgctaaacaagatcaggaagaggggaaaagggcactatggtttatatttttatatatttctgctgcttcgtcaggcttagatgtgctagatctttctttcttctttttgtgggtagaatttgaatccctcagcattgttcatcggtagtttttcttttcatgatttgtgacaaatgcagcctcgtgcggagcttttttgtaggtagaccgcggaccggtcgcgcctcagcagtcgctgtcgttaacccagcggtactcgctgaggcgatcgcgggcccggtaccctgcaatgtgaccctagacttgtccatcttctggattggccaacttaattaatgtatgaaataaaaggatgcacacatagtgacatgctaatcactataatgtgggcatcaaagttgtgtgttatgtgtaattactaattatctgaataagagaaagagatcatccatatttcttatcctaaatgaatgtcacgtgtctttataattctttgatgaaccagatgcattttattaaccaattccatatacatataaatattaatcatatataattaatatcaattgggttagcaaaacaaatctagtctaggtgtgttttgctaattattgggggatagtgcaaaaagaaatctacgttctcaataattcagatagaaaacttaataaagtgagataatttacatagattgcttttatcctttgatatatgtgaaaccatgcatgatataaggaaaatagatagagaaataattttttacatcgttgaatatgtaaacaatttaattcaagaagctaggaatataaatattgaggagtttatgattattattattattttgatgttcaatgaagttttttttaatttcatatgaagtatacaaaaattcttcatagatttttgtttctatgccgtagttatctttaatatatttgtggttgaagaaatttattgctagaaacgaatggattgtcaatttttttttaaagcaaatatatatgaaattatactgtatattattttagtcatgattaaaatgtggccttaattgaatcatctttctcattcattttttcaaaagcatatcaggatgattgatatttatctattttaaaaattaatttaagggttcaaattaaatttaacttaaaagtgtcctaaccgtagttaaaggtttactttaaaaaaatactatgaaaaatctaatcttctatgaatcgacctgcaggatttaaatccatcgttctggggcctaacgggccaagctttccgatcctacctgtcacttcatcaaaaggacagtagaaaaggaaggtggcacctacaaatgccatcattgcgataaaggaaaggctatcattcaagatgcctctgccgacagtggtcccaaagatggacccccacccacgaggagcatcgtggaaaaagaagacgttccaaccacgtcttcaaagcaagtggattgatgtgatacttccactgacgtaagggatgacgcacaatcccactatccttcgcaagacccttcctctatataaggaagttcatttcatttggagaggacacgctgaaatcaccagtctctctctacaagatcggggatctctagctagacgatcgtttcgcatgattgaacaagatggattgcacgcaggttctccggccgcttgggtggagaggctattcggctatgactgggcacaacagacaatcggctgctctgatgccgccgtgttccggctgtcagcgcaggggcgcccggttctttttgtcaagaccgacctgtccggtgccctgaatgaactgcaggacgaggcagcgcggctatcgtggctggccacgacgggcgttccttgcgcagctgtgctcgacgttgtcactgaagcgggaagggactggctgctattgggcgaagtgccggggcaggatctcctgtcatctcaccttgctcctgccgagaaagtatccatcatggctgatgcaatgcggcggctgcatacgcttgatccggctacctgcccattcgaccaccaagcgaaacatcgcatcgagcgagcacgtactcggatggaagccggtcttgtcgatcaggatgatctggacgaagagcatcaggggctcgcgccagccgaactgttcgccaggctcaaggcgcgcatgcccgacggcgaggatctcgtcgtgacccatggcgatgcctgcttgccgaatatcatggtggaaaatggccgcttttctggattcatcgactgtggccggctgggtgtggcggaccgctatcaggacatagcgttggctacccgtgatattgctgaagagcttggcggcgaatgggctgaccgcttcctcgtgctttacggtatcgccgctcccgattcgcagcgcatcgccttctatcgccttcttgacgagttcttctgagcgggactctggggttcgaagaattcccgatcgttcaaacatttggcaataaagtttcttaagattgaatcctgttgccggtcttgcgatgattatcatataatttctgttgaattacgttaagcatgtaataattaacatgtaatgcatgacgttatttatgagatgggtttttatgattagagtcccgcaattatacatttaatacgcgatagaaaacaaaatatagcgcgcaaactaggataaattatcgcgcgcggtgtcatctatgttactagatcggggatatcgcgtgtctttataattctttgatgaaccagatgcattttattaaccaattccatatacatataaatattaatcatatataattaatatcaattgggttagcaaaacaaatctagtctaggtgtgttttgctaattattgggggatagtgcaaaaagaaatctacgttctcaataattcagatagaaaacttaataaagtgagataatttacatagattgcttttatcctttgatatatgtgaaaccatgcatgatataaggaaaatagatagagaaataattttttacatcgttgaatatgtaaacaatttaattcaagaagctaggaatataaatattgaggagtttatgattattattattattttgatgttcaatgaagttttttttaatttcatatgaagtatacaaaaattcttcatagatttttgtttctatgccgtagttatctttaatatatttgtggttgaagaaatttattgctagaaacgaatggattgtcaatttttttttaaagcaaatatatatgaaattatactgtatattattttagtcatgattaaaatgtggccttaattgaatcatctttctcattcattttttcaaaagcatatcaggatgattgatatttatctattttaaaaattaatttaagggttcaaattaaatttaacttaaaagtgtcctaaccgtagttaaaggtttactttaaaaaaatactatgaaaaatctaatcttctatgaatcgaccgctgatcgatcgcggccgctgg

SEQ ID NO: 10027 - DNA, 9754 bp, Artificial
  base vector pMON74532
gatggggatcagattgtcgtttcccgccttcagtttaaactatcagtgtttgacaggatatattggcgggtaaacctaagagaaaagagcgtttattagaataatcggatatttaaaagggcgtgaaaaggtttatccgttcgtccatttgtatgtgcatgccaaccacagggttcccctcgggagtgcttggcattccgtgcgataatgacttctgttcaaccacccaaacgtcggaaagcctgacgacggagcagcattccaaaaagatcccttggctcgtctgggtcggctagaaggtcgagtgggctgctgtggcttgatccctcaacgcggtcgcggacgtagcgcagcgccgaaaaatcctcgatcggaggaccgaaggagctaaccgcttttttgcacaacatgggggatcatgtaactcgccttgatcgttgggaaccggagctgaatgaagccataccaaacgacgagcgtgacaccacgatgcctgcagcatctaacgcttgagttaagccgcgccgcgaagcggcgtcggcttgaacgaattgttagacattatttgccgactaccttggtgatctcgcctttcacgtagtgaacaaattcttccaactgatctgcgcgcgaggccaagcgatcttcttgtccaagataagcctgcctagcttcaagtatgacgggctgatactgggccggcaggcgctccattgcccagtcggcagcgacatccttcggcgcgattttgccggttactgcgctgtaccaaatgcgggacaacgtaagcactacatttcgctcatcgccagcccagtcgggcggcgagttccatagcgttaaggtttcatttagcgcctcaaatagatcctgttcaggaaccggatcaaagagttcctccgccgctggacctaccaaggcaacgctatgttctcttgcttttgtcagcaagatagccagatcaatgtcgatcgtggctggctcgaagatacctgcaagaatgtcattgcgctgccattctccaaattgcagttcgcgcttagctggataacgccacggaatgatgtcgtcgtgcacaacaatggtgacttctacagcgcggagaatctcgctctctccaggggaagccgaagtttccaaaaggtcgttgatcaaagctcgccgcgttgtttcatcaagccttacggtcaccgtaaccagcaaatcaatatcactgtgtggcttcaggccgccatccactgcggagccgtacaaatgtacggccagcaacgtcggttcgagatggcgctcgatgacgccaactacctctgatagttgagtcgatacttcggcgatcaccgcttccctcatgatgtttaactcctgaattaagccgcgccgcgaagcggtgtcggcttgaatgaattgttaggcgtcatcctgtgctcccgacctgcagcaatggcaacaacgttgcgcaaactattaactggcgaactacttactctagcttcccggcaacaattaatagactggatggaggcggataaagttgcaggaccacttctgcgctcggcccttccggctggctggtttattgctgataaatctggagccggtgagcgtgggtctcgcggtatcattgcagcactggggccagatggtaagccctcccgtatcgtagttatctacacgacggggagtcaggcaactatggatgaacgaaatagacagatcgctgagataggtgcctcactgattaagcattggtaactgtcagaccaagtttactcatatatactttagattgatttaaaacttcatttttaatttaaaaggatctaggtgaagatcctttttgataatctcatgaccaaaatcccttaacgtgagttttcgttccactgagcgtcagaccccgtagaaaagatcaaaggatcttcttgagatcctttttttctgcgcgtaatctgctgcttgcaaacaaaaaaaccaccgctaccagcggtggtttgtttgccggatcaagagctaccaactctttttccgaaggtaactggcttcagcagagcgcagataccaaatactgtccttctagtgtagccgtagttaggccaccacttcaagaactctgtagcaccgcctacatacctcgctctgctaatcctgttaccagtggctgctgccagtggcgataagtcgtgtcttaccgggttggactcaagacgatagttaccggataaggcgcagcggtcgggctgaacggggggttcgtgcacacagcccagcttggagcgaacgacctacaccgaactgagatacctacagcgtgagctatgagaaagcgccacgcttcccgaagggagaaaggcggacaggtatccggtaagcggcagggtcggaacaggagagcgcacgagggagcttccagggggaaacgcctggtatctttatagtcctgtcgggtttcgccacctctgacttgagcgtcgatttttgtgatgctcgtcaggggggcggagcctatggaaaaacgccagcaacgcggcctttttacggttcctggccttttgctggccttttgctcacatgttctttcctgcgttatcccctgattctgtggataaccgtattaccgcctttgagtgagctgataccgctcgccgcagccgaacgaccgagcgcagcgagtcagtgagcgaggaagcggaagagcgcctgatgcggtattttctccttacgcatctgtgcggtatttcacaccgcatatggtgcactctcagtacaatctgctctgatgccgcatagttaagccagtatacactccgctatcgctacgtgactgggtcatggctgcgccccgacacccgccaacacccgctgacgcgccctgacgggcttgtctgctcccggcatccgcttacagacaagctgtgaccgtctccgggagctgcatgtgtcagaggttttcaccgtcatcaccgaaacgcgcgaggcagctgcggtaaagctcatcagcgtggtcgtgaagcgattcacagatgtctgcctgttcatccgcgtccagctcgttgagtttctccagaagcgttaatgtctggcttctgataaagcgggccatgttaagggcggttttttcctgtttggtcactgatgcctccgtgtaagggggatttctgttcatgggggtaatgataccgatgaaacgagagaggatgctcacgatacgggttactgatgatgaacatgcccggttactggaacgttgtgagggtaaacaactggcggtatggatgcggcgggaccagagaaaaatcactcagggtcaatgccagcgcttcgttaatacagatgtaggtgttccacagggtagccagcagcatcctgcgatgcagatccggaacataatggtgcagggcgctgacttccgcgtttccagactttacgaaacacggaaaccgaagaccattcatgttgttgctcaggtcgcagacgttttgcagcagcagtcgcttcacgttcgctcgcgtatcggtgattcattctgctaaccagtaaggcaaccccgccagcctagccgggtcctcaacgacaggagcacgatcatgcgcacccgtggccaggacccaacgctgcccgagatgcgccgcgtgcggctgctggagatggcggacgcgatggatatgttctgccaagggttggtttgcgcattcacagttctccgcaagaattgattggctccaattcttggagtggtgaatccgttagcgaggtgccgccggcttccattcaggtcgaggtggcccggctccatgcaccgcgacgcaacgcggggaggcagacaaggtatagggcggcgcctacaatccatgccaacccgttccatgtgctcgccgaggcggcataaatcgccgtgacgatcagcggtccaatgatcgaagttaggctggtaagagccgcgagcgatccttgaagctgtccctgatggtcgtcatctacctgcctggacagcatggcctgcaacgcgggcatcccgatgccgccggaagcgagaagaatcataatggggaaggccatccagcctcgcgtcgcgaacgccagcaagacgtagcccagcgcgtcggccgccatgccggcgataatggcctgcttctcgccgaaacgtttggtggcgggaccagtgacgaaggcttgagcgagggcgtgcaagattccgaataccgcaagcgacaggccgatcatcgtcgcgctccagcgaaagcggtcctcgccgaaaatgacccagagcgctgccggcacctgtcctacgagttgcatgataaagaagacagtcataagtgcggcgacgatagtcatgccccgcgcccaccggaaggagctgactgggttgaaggctctcaagggcatcggtcgatcgaccctttccgacgctcaccgggctggttgccctcgccgctgggctggcggccgtctatggccctgcaaacgcgccagaaacgccgtcgaagccgtgtgcgagacaccgcggccggccgccggcgttgtggatacctcgcggaaaacttggccctcactgacagatgaggggcggacgttgacacttgaggggccgactcacccggcgcggcgttgacagatgaggggcaggctcgatttcggccggcgacgtggagctggccagcctcgcaaatcggcgaaaacgcctgattttacgcgagtttcccacagatgatgtggacaagcctggggataagtgccctgcggtattgacacttgaggggcgcgactactgacagatgaggggcgcgatccttgacacttgaggggcagagtgctgacagatgaggggcgcacctattgacatttgaggggctgtccacaggcagaaaatccagcatttgcaagggtttccgcccgtttttcggccaccgctaacctgtcttttaacctgcttttaaaccaatatttataaaccttgtttttaaccagggctgcgccctgtgcgcgtgaccgcgcacgccgaaggggggtgcccccccttctcgaaccctcccggcccgctaacgcgggcctcccatccccccaggggctgcgcccctcggccgcgaacggcctcaccccaaaaatggcagccaagctaggaaaagtcccatgtggatcactccgttgccccgtcgctcaccgtgttggggggaaggtgcacatggctcagttctcaatggaaattatctgcctaaccggctcagttctgcgtagaaaccaacatgcaagctccaccgggtgcaaagcggcagcggcggcaggatatattcaattgtaaatggcttcatgtccgggaaatctacatggatcagcaatgagtatgatggtcaatatggagaaaaagaaagagtaattaccaattttttttcaattcaaaaatgtagatgtccgcagcgttattataaaatgaaagtacattttgataaaacgacaaattacgatccgtcgtatttataggcgaaagcaataaacaaattattctaattcggaaatctttatttcgacgtgtctacattcacgtccaaatgggggcttagatgagaaacttcacgatcgatgcggccaccactcgagaagcttactagtcaacaattggccaatctttgttctaaattgctaataaacgaccatttccgtcaattctccttggttgcaacagtctacccgtcaaatgtttactaatttataagtgtgaagtttgaattatgaaagacgaaatcgtattaaaaattcacaagaataaacaactccatagattttcaaaaaaacagtcacgagaaaaaaaccacagtccgtttgtctgctcttctagtttttattatttttctattaatagttttttgttatttcgagaataaaatttgaacgatgtccgaaccacaaaagccgagccgataaatcctaagccgagcctaactttagccgtaaccatcagtcacggctcccgggctaattcatttgaaccgaatcataatcaacggtttagatcaaactcaaaacaatctaacggcaacatagacgcgtcggtgagctaaaaagagtgtgaaagccaggtcaccatagcattgtctctcccagattttttatttgggaaataatagaagaaatagaaaaaaataaaagagtgagaaaaatcgtagagctatatattcgcacatgtactcgtttcgctttccttagtgttagctgctgccgctgttgtttctcctccatttctctatctttctctctcgctgcttctcgaatcttctgtatcatcttcttcttcttcaaggtgagtctctagatccgttcgcttgattttgctgctcgttagtcgttattgttgattctctatgccgatttcgctagatctgtttagcatgcgttgtggttttatgagaaaatctttgttttgggggttgcttgttatgtgattcgatccgtgcttgttggatcgatctgagctaattcttaaggtttatgtgttagatctatggagtttgaggattcttctcgcttctgtcgatctctcgctgttatttttgtttttttcagtgaagtgaagttgtttagttcgaaatgacttcgtgtatgctcgattgatctggttttaatcttcgatctgttaggtgttgatgtttacaagtgaattctagtgttttctcgttgagatctgtgaagtttgaacctagttttctcaataatcaacatatgaagcgatgtttgagtttcaataaacgctgctaatcttcgaaactaagttgtgatctgattcgtgtttacttcatgagcttatccaattcatttcggtttcattttactttttttttagtgaaccatggcgcaagttagcagaatctgcaatggtgtgcagaacccatctcttatctccaatctctcgaaatccagtcaacgcaaatctcccttatcggtttctctgaagacgcagcagcatccacgagcttatccgatttcgtcgtcgtggggattgaagaagagtgggatgacgttaattggctctgagcttcgtcctcttaaggtcatgtcttctgtttccacggcgtgcatgcttcatggagcttcatctaggccagctactgccaggaagtctagcgggctcagtggcaccgtgcgcatccctggcgataaaagtatttcacacaggagcttcatgttcggaggacttgctagtggagagacgagaatcactggtttgcttgagggcgaagatgttatcaacaccggtaaggcgatgcaagcaatgggtgccagaatccgaaaagagggcgatacgtggatcatcgacggtgttggtaacggaggattgctcgctcccgaagcgccacttgactttgggaacgcagctacggggtgccgtcttactatgggactggtaggcgtgtatgactttgactctaccttcatcggtgacgcgagcctcactaagagaccaatgggacgagtgctgaatcccctgagggagatgggtgtccaggtgaaatctgaggatggtgatcgtcttccggttactctgcgaggccccaagacccccacgccaatcacgtacagggttccgatggcgtcagcacaggtcaagtcagcggtactcctggcgggcctcaacacacctggaatcacaaccgtgattgaacccatcatgactagagaccacacggagaagatgttgcagggtttcggcgctaatctaacggtcgaaaccgacgccgacggcgtgaggacaatccgcttggagggcagaggtaaactgactggccaagtcatcgatgtgcctggagatccctcgtccacagcgtttcccctcgtagctgcgttgctcgtccctggatctgatgtgacgatcctgaatgtcctcatgaatccaactagaaccggcctcatcctcacattgcaggagatgggtgctgacatcgaggttatcaatcctaggttggcaggtggagaggatgtggccgatctgcgcgtgcgttctagtacactcaaaggcgtgaccgtccctgaggatcgcgctccatccatgatcgacgagtaccccattctcgccgttgctgctgcgtttgccgagggcgcaactgtaatgaacggccttgaggagttgagggttaaggagagtgacaggctgtccgcggtggcgaatggcctgaagctaaacggcgtggactgcgacgaaggtgaaacgtcccttgtagtccgtggtcgcccagacgggaaggggttggggaatgcttcgggagctgctgtggcgacgcaccttgatcatagaatcgccatgtcatttctggtgatgggacttgtctccgagaatccggtgaccgttgacgatgctaccatgatcgccacctcctttcctgagttcatggacctcatggcaggcttgggggccaagatcgagctgtctgatactaaggccgcttgaattcccgatcgttcaaacatttggcaataaagtttcttaagattgaatcctgttgccggtcttgcgatgattatcatataatttctgttgaattacgttaagcatgtaataattaacatgtaatgcatgacgttatttatgagatgggtttttatgattagagtcccgcaattatacatttaatacgcgatagaaaacaaaatatagcgcgcaaactaggataaattatcgcgcgcggtgtcatctatgttactagatcggggatcccacgtgcggaccgcctgcaggccgcgttatcaagctaactgcaggtccgatgtgagacttttcaacaaagggtaatatccggaaacctcctcggattccattgcccagctatctgtcactttattgtgaagatagtggaaaaggaaggtggctcctacaaatgccatcattgcgataaaggaaaggccatcgttgaagatgcctctgccgacagtggtcccaaagatggacccccacccacgaggagcatcgtggaaaaagaagacgttccaaccacgtcttcaaagcaagtggattgatgtgatggtccgattgagacttttcaacaaagggtaatatccggaaacctcctcggattccattgcccagctatctgtcactttattgtgaagatagtggaaaaggaaggtggctcctacaaatgccatcattgcgataaaggaaaggccatcgttgaagatgcctctgccgacagtggtcccaaagatggacccccacccacgaggagcatcgtggaaaaagaagacgttccaaccacgtcttcaaagcaagtggattgatgtgatatctccactgacgtaagggatgacgcacaatcccactatccttcgcaagacccttcctctatataaggaagttcatttcatttggagaggaccaggtggtaccggcgcgccaggcctggtagtctgattaattaagcgatcgcgggccctgatcacctgtcgtacagtatttctacatttgatgtgtgatttgtgaagaacatcaaacaaaacaagcactggctttaatatgatgataagtattatggtaattaattaattggcaaaaacaacaatgaagctaaaattttatttattgagccttgcggttaatttcttgtgatgatctttttttttattttctaattatatatagtttcctttgctttgaaatgctaaaggtttgagagagttatgctctttttttcttcctctttcttttttaactttatcatacaaattttgaataaaaatgtgagtacattgagctcatttaaataagctt

SEQ ID NO: 10028 - DNA, 9769 bp, Artificial
  base vector pMON82053
ggtccgatgtgagacttttcaacaaagggtaatatccggaaacctcctcggattccattgcccagctatctgtcactttattgtgaagatagtggaaaaggaaggtggctcctacaaatgccatcattgcgataaaggaaaggccatcgttgaagatgcctctgccgacagtggtcccaaagatggacccccacccacgaggagcatcgtggaaaaagaagacgttccaaccacgtcttcaaagcaagtggattgatgtgatggtccgattgagacttttcaacaaagggtaatatccggaaacctcctcggattccattgcccagctatctgtcactttattgtgaagatagtggaaaaggaaggtggctcctacaaatgccatcattgcgataaaggaaaggccatcgttgaagatgcctctgccgacagtggtcccaaagatggacccccacccacgaggagcatcgtggaaaaagaagacgttccaaccacgtcttcaaagcaagtggattgatgtgatatctccactgacgtaagggatgacgcacaatcccactatccttcgcaagacccttcctctatataaggaagttcatttcatttggagaggaccaggtggtaccggcgcgcctcagcagtcgctgtcgttaacccagcggtactcgctgaggcgatcgcgggccctgatcacctgtcgtacagtatttctacatttgatgtgtgatttgtgaagaacatcaaacaaaacaagcactggctttaatatgatgataagtattatggtaattaattaattggcaaaaacaacaatgaagctaaaattttatttattgagccttgcggttaatttcttgtgatgatctttttttttattttctaattatatatagtttcctttgctttgaaatgctaaaggtttgagagagttatgctctttttttcttcctctttcttttttaactttatcatacaaattttgaataaaaatgtgagtacattgagctcatttaaataagcttgatggggatcagattgtcgtttcccgccttcagtttaaactatcagtgtttgacaggatatattggcgggtaaacctaagagaaaagagcgtttattagaataatcggatatttaaaagggcgtgaaaaggtttatccgttcgtccatttgtatgtgcatgccaaccacagggttcccctcgggagtgcttggcattccgtgcgataatgacttctgttcaaccacccaaacgtcggaaagcctgacgacggagcagcattccaaaaagatcccttggctcgtctgggtcggctagaaggtcgagtgggctgctgtggcttgatccctcaacgcggtcgcggacgtagcgcagcgccgaaaaatcctcgatcggaggaccgaaggagctaaccgcttttttgcacaacatgggggatcatgtaactcgccttgatcgttgggaaccggagctgaatgaagccataccaaacgacgagcgtgacaccacgatgcctgcagcatctaacgcttgagttaagccgcgccgcgaagcggcgtcggcttgaacgaattgttagacattatttgccgactaccttggtgatctcgcctttcacgtagtgaacaaattcttccaactgatctgcgcgcgaggccaagcgatcttcttgtccaagataagcctgcctagcttcaagtatgacgggctgatactgggccggcaggcgctccattgcccagtcggcagcgacatccttcggcgcgattttgccggttactgcgctgtaccaaatgcgggacaacgtaagcactacatttcgctcatcgccagcccagtcgggcggcgagttccatagcgttaaggtttcatttagcgcctcaaatagatcctgttcaggaaccggatcaaagagttcctccgccgctggacctaccaaggcaacgctatgttctcttgcttttgtcagcaagatagccagatcaatgtcgatcgtggctggctcgaagatacctgcaagaatgtcattgcgctgccattctccaaattgcagttcgcgcttagctggataacgccacggaatgatgtcgtcgtgcacaacaatggtgacttctacagcgcggagaatctcgctctctccaggggaagccgaagtttccaaaaggtcgttgatcaaagctcgccgcgttgtttcatcaagccttacggtcaccgtaaccagcaaatcaatatcactgtgtggcttcaggccgccatccactgcggagccgtacaaatgtacggccagcaacgtcggttcgagatggcgctcgatgacgccaactacctctgatagttgagtcgatacttcggcgatcaccgcttccctcatgatgtttaactcctgaattaagccgcgccgcgaagcggtgtcggcttgaatgaattgttaggcgtcatcctgtgctcccgacctgcagcaatggcaacaacgttgcgcaaactattaactggcgaactacttactctagcttcccggcaacaattaatagactggatggaggcggataaagttgcaggaccacttctgcgctcggcccttccggctggctggtttattgctgataaatctggagccggtgagcgtgggtctcgcggtatcattgcagcactggggccagatggtaagccctcccgtatcgtagttatctacacgacggggagtcaggcaactatggatgaacgaaatagacagatcgctgagataggtgcctcactgattaagcattggtaactgtcagaccaagtttactcatatatactttagattgatttaaaacttcatttttaatttaaaaggatctaggtgaagatcctttttgataatctcatgaccaaaatcccttaacgtgagttttcgttccactgagcgtcagaccccgtagaaaagatcaaaggatcttcttgagatcctttttttctgcgcgtaatctgctgcttgcaaacaaaaaaaccaccgctaccagcggtggtttgtttgccggatcaagagctaccaactctttttccgaaggtaactggcttcagcagagcgcagataccaaatactgtccttctagtgtagccgtagttaggccaccacttcaagaactctgtagcaccgcctacatacctcgctctgctaatcctgttaccagtggctgctgccagtggcgataagtcgtgtcttaccgggttggactcaagacgatagttaccggataaggcgcagcggtcgggctgaacggggggttcgtgcacacagcccagcttggagcgaacgacctacaccgaactgagatacctacagcgtgagctatgagaaagcgccacgcttcccgaagggagaaaggcggacaggtatccggtaagcggcagggtcggaacaggagagcgcacgagggagcttccagggggaaacgcctggtatctttatagtcctgtcgggtttcgccacctctgacttgagcgtcgatttttgtgatgctcgtcaggggggcggagcctatggaaaaacgccagcaacgcggcctttttacggttcctggccttttgctggccttttgctcacatgttctttcctgcgttatcccctgattctgtggataaccgtattaccgcctttgagtgagctgataccgctcgccgcagccgaacgaccgagcgcagcgagtcagtgagcgaggaagcggaagagcgcctgatgcggtattttctccttacgcatctgtgcggtatttcacaccgcatatggtgcactctcagtacaatctgctctgatgccgcatagttaagccagtatacactccgctatcgctacgtgactgggtcatggctgcgccccgacacccgccaacacccgctgacgcgccctgacgggcttgtctgctcccggcatccgcttacagacaagctgtgaccgtctccgggagctgcatgtgtcagaggttttcaccgtcatcaccgaaacgcgcgaggcagctgcggtaaagctcatcagcgtggtcgtgaagcgattcacagatgtctgcctgttcatccgcgtccagctcgttgagtttctccagaagcgttaatgtctggcttctgataaagcgggccatgttaagggcggttttttcctgtttggtcactgatgcctccgtgtaagggggatttctgttcatgggggtaatgataccgatgaaacgagagaggatgctcacgatacgggttactgatgatgaacatgcccggttactggaacgttgtgagggtaaacaactggcggtatggatgcggcgggaccagagaaaaatcactcagggtcaatgccagcgcttcgttaatacagatgtaggtgttccacagggtagccagcagcatcctgcgatgcagatccggaacataatggtgcagggcgctgacttccgcgtttccagactttacgaaacacggaaaccgaagaccattcatgttgttgctcaggtcgcagacgttttgcagcagcagtcgcttcacgttcgctcgcgtatcggtgattcattctgctaaccagtaaggcaaccccgccagcctagccgggtcctcaacgacaggagcacgatcatgcgcacccgtggccaggacccaacgctgcccgagatgcgccgcgtgcggctgctggagatggcggacgcgatggatatgttctgccaagggttggtttgcgcattcacagttctccgcaagaattgattggctccaattcttggagtggtgaatccgttagcgaggtgccgccggcttccattcaggtcgaggtggcccggctccatgcaccgcgacgcaacgcggggaggcagacaaggtatagggcggcgcctacaatccatgccaacccgttccatgtgctcgccgaggcggcataaatcgccgtgacgatcagcggtccaatgatcgaagttaggctggtaagagccgcgagcgatccttgaagctgtccctgatggtcgtcatctacctgcctggacagcatggcctgcaacgcgggcatcccgatgccgccggaagcgagaagaatcataatggggaaggccatccagcctcgcgtcgcgaacgccagcaagacgtagcccagcgcgtcggccgccatgccggcgataatggcctgcttctcgccgaaacgtttggtggcgggaccagtgacgaaggcttgagcgagggcgtgcaagattccgaataccgcaagcgacaggccgatcatcgtcgcgctccagcgaaagcggtcctcgccgaaaatgacccagagcgctgccggcacctgtcctacgagttgcatgataaagaagacagtcataagtgcggcgacgatagtcatgccccgcgcccaccggaaggagctgactgggttgaaggctctcaagggcatcggtcgatcgaccctttccgacgctcaccgggctggttgccctcgccgctgggctggcggccgtctatggccctgcaaacgcgccagaaacgccgtcgaagccgtgtgcgagacaccgcggccggccgccggcgttgtggatacctcgcggaaaacttggccctcactgacagatgaggggcggacgttgacacttgaggggccgactcacccggcgcggcgttgacagatgaggggcaggctcgatttcggccggcgacgtggagctggccagcctcgcaaatcggcgaaaacgcctgattttacgcgagtttcccacagatgatgtggacaagcctggggataagtgccctgcggtattgacacttgaggggcgcgactactgacagatgaggggcgcgatccttgacacttgaggggcagagtgctgacagatgaggggcgcacctattgacatttgaggggctgtccacaggcagaaaatccagcatttgcaagggtttccgcccgtttttcggccaccgctaacctgtcttttaacctgcttttaaaccaatatttataaaccttgtttttaaccagggctgcgccctgtgcgcgtgaccgcgcacgccgaaggggggtgcccccccttctcgaaccctcccggcccgctaacgcgggcctcccatccccccaggggctgcgcccctcggccgcgaacggcctcaccccaaaaatggcagccaagctaggaaaagtcccatgtggatcactccgttgccccgtcgctcaccgtgttggggggaaggtgcacatggctcagttctcaatggaaattatctgcctaaccggctcagttctgcgtagaaaccaacatgcaagctccaccgggtgcaaagcggcagcggcggcaggatatattcaattgtaaatggcttcatgtccgggaaatctacatggatcagcaatgagtatgatggtcaatatggagaaaaagaaagagtaattaccaattttttttcaattcaaaaatgtagatgtccgcagcgttattataaaatgaaagtacattttgataaaacgacaaattacgatccgtcgtatttataggcgaaagcaataaacaaattattctaattcggaaatctttatttcgacgtgtctacattcacgtccaaatgggggcttagatgagaaacttcacgatcgatgcggccaccactcgagaagcttactagtcaacaattggccaatctttgttctaaattgctaataaacgaccatttccgtcaattctccttggttgcaacagtctacccgtcaaatgtttactaatttataagtgtgaagtttgaattatgaaagacgaaatcgtattaaaaattcacaagaataaacaactccatagattttcaaaaaaacagtcacgagaaaaaaaccacagtccgtttgtctgctcttctagtttttattatttttctattaatagttttttgttatttcgagaataaaatttgaacgatgtccgaaccacaaaagccgagccgataaatcctaagccgagcctaactttagccgtaaccatcagtcacggctcccgggctaattcatttgaaccgaatcataatcaacggtttagatcaaactcaaaacaatctaacggcaacatagacgcgtcggtgagctaaaaagagtgtgaaagccaggtcaccatagcattgtctctcccagattttttatttgggaaataatagaagaaatagaaaaaaataaaagagtgagaaaaatcgtagagctatatattcgcacatgtactcgtttcgctttccttagtgttagctgctgccgctgttgtttctcctccatttctctatctttctctctcgctgcttctcgaatcttctgtatcatcttcttcttcttcaaggtgagtctctagatccgttcgcttgattttgctgctcgttagtcgttattgttgattctctatgccgatttcgctagatctgtttagcatgcgttgtggttttatgagaaaatctttgttttgggggttgcttgttatgtgattcgatccgtgcttgttggatcgatctgagttaattcttaaggtttatgtgttagatctatggagtttgaggattcttctcgcttctgtcgatctctcgctgttatttttgtttttttcagtgaagtgaagttgtttagttcgaaatgacttcgtgtatgctcgattgatctggttttaatcttcgatctgttaggtgttgatgtttacaagtgaattctagtgttttctcgttgagatctgtgaagtttgaacctagttttctcaataatcaacatatgaagcgatgtttgagtttcaataaacgctgctaatcttcgaaactaagttgtgatctgattcgtgtttacttcatgagcttatccaattcatttcggtttcattttactttttttttagtgaaccatggcgcaagttagcagaatctgcaatggtgtgcagaacccatctcttatctccaatctctcgaaatccagtcaacgcaaatctcccttatcggtttctctgaagacgcagcagcatccacgagcttatccgatttcgtcgtcgtggggattgaagaagagtgggatgacgttaattggctctgagcttcgtcctcttaaggtcatgtcttctgtttccacggcgtgcatgcttcatggagcttcatctaggccagctactgccaggaagtctagcgggctcagtggcaccgtgcgcatccctggcgataaaagtatttcacacaggagcttcatgttcggaggacttgctagtggagagacgagaatcactggtttgcttgagggcgaagatgttatcaacaccggtaaggcgatgcaagcaatgggtgccagaatccgaaaagagggcgatacgtggatcatcgacggtgttggtaacggaggattgctcgctcccgaagcgccacttgactttgggaacgcagctacggggtgccgtcttactatgggactggtaggcgtgtatgactttgactctaccttcatcggtgacgcgagcctcactaagagaccaatgggacgagtgctgaatcccctgagggagatgggtgtccaggtgaaatctgaggatggtgatcgtcttccggttactctgcgaggccccaagacccccacgccaatcacgtacagggttccgatggcgtcagcacaggtcaagtcagcggtactcctggcgggcctcaacacacctggaatcacaaccgtgattgaacccatcatgactagagaccacacggagaagatgttgcagggtttcggcgctaatctaacggtcgaaaccgacgccgacggcgtgaggacaatccgcttggagggcagaggtaaactgactggccaagtcatcgatgtgcctggagatccctcgtccacagcgtttcccctcgtagctgcgttgctcgtccctggatctgatgtgacgatcctgaatgtcctcatgaatccaactagaaccggcctcatcctcacattgcaggagatgggtgctgacatcgaggttatcaatcctaggttggcaggtggagaggatgtggccgatctgcgcgtgcgttctagtacactcaaaggcgtgaccgtccctgaggatcgcgctccatccatgatcgacgagtaccccattctcgccgttgctgctgcgtttgccgagggcgcaactgtaatgaacggccttgaggagttgagggttaaggagagtgacaggctgtccgcggtggcgaatggcctgaagctaaacggcgtggactgcgacgaaggtgaaacgtcccttgtagtccgtggtcgcccagacgggaaggggttggggaatgcttcgggagctgctgtggcgacgcaccttgatcatagaatcgccatgtcatttctggtgatgggacttgtctccgagaatccggtgaccgttgacgatgctaccatgatcgccacctcctttcctgagttcatggacctcatggcaggcttgggggccaagatcgagctgtctgatactaaggccgcttgaattcccgatcgttcaaacatttggcaataaagtttcttaagattgaatcctgttgccggtcttgcgatgattatcatataatttctgttgaattacgttaagcatgtaataattaacatgtaatgcatgacgttatttatgagatgggtttttatgattagagtcccgcaattatacatttaatacgcgatagaaaacaaaatatagcgcgcaaactaggataaattatcgcgcgcggtgtcatctatgttactagatcggggatcccacgtgcggaccgcctgcaggccgcgttatcaagctaactgca

SEQ ID NO: 10029 - DNA, 10846 bp, Artificial
  pMON74470
actagtcaacaattggccaatctttgttctaaattgctaataaacgaccatttccgtcaattctccttggttgcaacagtctacccgtcaaatgtttactaatttataagtgtgaagtttgaattatgaaagacgaaatcgtattaaaaattcacaagaataaacaactccatagattttcaaaaaaacagtcacgagaaaaaaaccacagtccgtttgtctgctcttctagtttttattatttttctattaatagttttttgttatttcgagaataaaatttgaacgatgtccgaaccacaaaagccgagccgataaatcctaagccgagcctaactttagccgtaaccatcagtcacggctcccgggctaattcatttgaaccgaatcataatcaacggtttagatcaaactcaaaacaatctaacggcaacatagacgcgtcggtgagctaaaaagagtgtgaaagccaggtcaccatagcattgtctctcccagattttttatttgggaaataatagaagaaatagaaaaaaataaaagagtgagaaaaatcgtagagctatatattcgcacatgtactcgtttcgctttccttagtgttagctgctgccgctgttgtttctcctccatttctctatctttctctctcgctgcttctcgaatcttctgtatcatcttcttcttcttcaaggtgagtctctagatccgttcgcttgattttgctgctcgttagtcgttattgttgattctctatgccgatttcgctagatctgtttagcatgcgttgtggttttatgagaaaatctttgttttgggggttgcttgttatgtgattcgatccgtgcttgttggatcgatctgagctaattcttaaggtttatgtgttagatctatggagtttgaggattcttctcgcttctgtcgatctctcgctgttatttttgtttttttcagtgaagtgaagttgtttagttcgaaatgacttcgtgtatgctcgattgatctggttttaatcttcgatctgttaggtgttgatgtttacaagtgaattctagtgttttctcgttgagatctgtgaagtttgaacctagttttctcaataatcaacatatgaagcgatgtttgagtttcaataaacgctgctaatcttcgaaactaagttgtgatctgattcgtgtttacttcatgagcttatccaattcatttcggtttcattttactttttttttagtgaaccatggcgcaagttagcagaatctgcaatggtgtgcagaacccatctcttatctccaatctctcgaaatccagtcaacgcaaatctcccttatcggtttctctgaagacgcagcagcatccacgagcttatccgatttcgtcgtcgtggggattgaagaagagtgggatgacgttaattggctctgagcttcgtcctcttaaggtcatgtcttctgtttccacggcgtgcatgcttcatggagcttcatctaggccagctactgccaggaagtctagcgggctcagtggcaccgtgcgcatccctggcgataaaagtatttcacacaggagcttcatgttcggaggacttgctagtggagagacgagaatcactggtttgcttgagggcgaagatgttatcaacaccggtaaggcgatgcaagcaatgggtgccagaatccgaaaagagggcgatacgtggatcatcgacggtgttggtaacggaggattgctcgctcccgaagcgccacttgactttgggaacgcagctacggggtgccgtcttactatgggactggtaggcgtgtatgactttgactctaccttcatcggtgacgcgagcctcactaagagaccaatgggacgagtgctgaatcccctgagggagatgggtgtccaggtgaaatctgaggatggtgatcgtcttccggttactctgcgaggccccaagacccccacgccaatcacgtacagggttccgatggcgtcagcacaggtcaagtcagcggtactcctggcgggcctcaacacacctggaatcacaaccgtgattgaacccatcatgactagagaccacacggagaagatgttgcagggtttcggcgctaatctaacggtcgaaaccgacgccgacggcgtgaggacaatccgcttggagggcagaggtaaactgactggccaagtcatcgatgtgcctggagatccctcgtccacagcgtttcccctcgtagctgcgttgctcgtccctggatctgatgtgacgatcctgaatgtcctcatgaatccaactagaaccggcctcatcctcacattgcaggagatgggtgctgacatcgaggttatcaatcctaggttggcaggtggagaggatgtggccgatctgcgcgtgcgttctagtacactcaaaggcgtgaccgtccctgaggatcgcgctccatccatgatcgacgagtaccccattctcgccgttgctgctgcgtttgccgagggcgcaactgtaatgaacggccttgaggagttgagggttaaggagagtgacaggctgtccgcggtggcgaatggcctgaagctaaacggcgtggactgcgacgaaggtgaaacgtcccttgtagtccgtggtcgcccagacgggaaggggttggggaatgcttcgggagctgctgtggcgacgcaccttgatcatagaatcgccatgtcatttctggtgatgggacttgtctccgagaatccggtgaccgttgacgatgctaccatgatcgccacctcctttcctgagttcatggacctcatggcaggcttgggggccaagatcgagctgtctgatactaaggccgcttgaattcccgatcgttcaaacatttggcaataaagtttcttaagattgaatcctgttgccggtcttgcgatgattatcatataatttctgttgaattacgttaagcatgtaataattaacatgtaatgcatgacgttatttatgagatgggtttttatgattagagtcccgcaattatacatttaatacgcgatagaaaacaaaatatagcgcgcaaactaggataaattatcgcgcgcggtgtcatctatgttactagatcggggatccccgggcggccgcgttatcaagctaactgcaggtccgatgtgagacttttcaacaaagggtaatatccggaaacctcctcggattccattgcccagctatctgtcactttattgtgaagatagtggaaaaggaaggtggctcctacaaatgccatcattgcgataaaggaaaggccatcgttgaagatgcctctgccgacagtggtcccaaagatggacccccacccacgaggagcatcgtggaaaaagaagacgttccaaccacgtcttcaaagcaagtggattgatgtgatggtccgattgagacttttcaacaaagggtaatatccggaaacctcctcggattccattgcccagctatctgtcactttattgtgaagatagtggaaaaggaaggtggctcctacaaatgccatcattgcgataaaggaaaggccatcgttgaagatgcctctgccgacagtggtcccaaagatggacccccacccacgaggagcatcgtggaaaaagaagacgttccaaccacgtcttcaaagcaagtggattgatgtgatatctccactgacgtaagggatgacgcacaatcccactatccttcgcaagacccttcctctatataaggaagttcatttcatttggagaggacacagaaaaatttgctacattgtttcacaaacttcaaatattattcatttatttgtcagctttcaaactctttgtttcttgtttgttgattagatctaccatggggagaggtaagatcgtgataaggaggatcgacaattccacgagcaggcaagtgacgttctcgaagcgaaggaacggtttgctgaagaaggcgaaggagcttgcgatcttgtgcgatgctgaagtcggagttatgatcttctccagcaccggaaaactctacgatttcgccagctccagcatgaaatcagtaatggaccgatacagcaaatcaaaagaagaaccttgtcaacttgggagttcagcctctgaaattaagttttggcaaagggaggcagcaatgttaaggcaacaattacacaatttgcaagaaagtcaccgcaggaaaatgatgggggaagaactgtcaggcttgacagtcaaagaattacaaaatttggagaaccaattagaaattagccttcatggtgtccgaatgaaaaaggatcaacttttaatgggtgaaatacaagagctaaatcgaaagggaaacctcatacaccaagaaaatgtggaactgtataagaaggtctatggaacacaagatgataacgaaacaaacagagattctgttctgacaaatggtctaggcataggagaggatttgcaagtgcctgtgaatctccagctaagccagccacagcaacagcaacaacactacaaggcatcttcaggaactacaaaattgggattgcaattgcattgaccgctcgagcgattacaaggatgatgatgataagtaagtcgacctagttagttaattcagctttcgttcgtatcatcggtttcgacaacgttcgtcaagttcaatgcatcagtttcattgcgcacacaccagaatcctactgagtttgagtattatggcattgggaaaactgtttttcttgtaccatttgttgtgcttgtaatttactgtgttttttattcggttttcgctatcgaactgtgaaatggaaatggatggagaagagttaatgaatgatatggtccttttgttcattctcaaattaatattatttgttttttctcttatttgttgtgtgttgaatttgaaattataagagatatgcaaacattttgttttgagtaaaaatgtgtcaaatcgtggcctctaatgaccgaagttaatatgaggagtaaaacacttgtagttgtaccattatgcttattcactaggcaacaaatatattttcagacctagaaaagctgcaaatgttactgaatacaagtatgtcctcttgtgttttagacatttatgaactttcctttatgtaattttccagaatccttgtcagattctaatcattgctttataattatagttatactcatggatttgtagttgagtatgaaaatattttttaatgcattttatgacttgccaattgattgacaacggatccccgggcggccgccactcgagtggtggccgcatcgatcgtgaagtttctcatctaagcccccatttggacgtgaatgtagacacgtcgaaataaagatttccgaattagaataatttgtttattgctttcgcctataaatacgacggatcgtaatttgtcgttttatcaaaatgtactttcattttataataacgctgcggacatctacatttttgaattgaaaaaaaattggtaattactctttctttttctccatattgaccatcatactcattgctgatccatgtagatttcccggacatgaagccatttacaattgaatatatcctgccgccgctgccgctttgcacccggtggagcttgcatgttggtttctacgcagaactgagccggttaggcagataatttccattgagaactgagccatgtgcaccttccccccaacacggtgagcgacggggcaacggagtgatccacatgggacttttcctagcttggctgccatttttggggtgaggccgttcgcggccgaggggcgcagcccctggggggatgggaggcccgcgttagcgggccgggagggttcgagaagggggggcaccccccttcggcgtgcgcggtcacgcgcacagggcgcagccctggttaaaaacaaggtttataaatattggtttaaaagcaggttaaaagacaggttagcggtggccgaaaaacgggcggaaacccttgcaaatgctggattttctgcctgtggacagcccctcaaatgtcaataggtgcgcccctcatctgtcatcactctgcccctcaagtgtcaaggatcgcgcccctcatctgtcagtagtcgcgcccctcaagtgtcaataccgcagggcacttatccccaggcttgtccacatcatctgtgggaaactcgcgtaaaatcaggcgttttcgccgatttgcgaggctggccagctccacgtcgccggccgaaatcgagcctgcccctcatctgtcaacgccgcgccgggtgagtcggcccctcaagtgtcaacgtccgcccctcatctgtcagtgagggccaagttttccgcgtggtatccacaacgccggcggccggccgcggtgtctcgcacacggcttcgacggcgtttctggcgcgtttgcagggccatagacggccgccagcccagcggcgagggcaaccagcccggtgagcgtcggaaagggtcgatcgaccgatgcccttgagagccttcaacccagtcagctccttccggtgggcgcggggcatgactatcgtcgccgcacttatgactgtcttctttatcatgcaactcgtaggacaggtgccggcagcgctctgggtcattttcggcgaggaccgctttcgctggagcgcgacgatgatcggcctgtcgcttgcggtattcggaatcttgcacgccctcgctcaagccttcgtcactggtcccgccaccaaacgtttcggcgagaagcaggccattatcgccggcatggcggccgacgcgctgggctacgtcttgctggcgttcgcgacgcgaggctggatggccttccccattatgattcttctcgcttccggcggcatcgggatgcccgcgttgcaggccatgctgtccaggcaggtagatgacgaccatcagggacagcttcaaggatcgctcgcggctcttaccagcctaacttcgatcactggaccgctgatcgtcacggcgatttatgccgcctcggcgagcacatggaacgggttggcatggattgtaggcgccgccctataccttgtctgcctccccgcgttgcgtcgcggtgcatggagccgggccacctcgacctgaatggaagccggcggcacctcgctaacggattcaccactccaagaattggagccaatcaattcttgcggagaactgtgaatgcgcaaaccaacccttggcagaacatatccatcgcgtccgccatctccagcagccgcacgcggcgcatctcgggcagcgttgggtcctggccacgggtgcgcatgatcgtgctcctgtcgttgaggacccggctaggctggcggggttgccttactggttagcagaatgaatcaccgatacgcgagcgaacgtgaagcgactgctgctgcaaaacgtctgcgacctgagcaacaacatgaatggtcttcggtttccgtgtttcgtaaagtctggaaacgcggaagtcagcgccctgcaccattatgttccggatctgcatcgcaggatgctgctggctaccctgtggaacacctacatctgtattaacgaagcgctggcattgaccctgagtgatttttctctggtcccgccgcatccataccgccagttgtttaccctcacaacgttccagtaaccgggcatgttcatcatcagtaacccgtatcgtgagcatcctctctcgtttcatcggtatcattacccccatgaacagaaatcccccttacacggaggcatcagtgaccaaacaggaaaaaaccgcccttaacatggcccgctttatcagaagccagacattaacgcttctggagaaactcaacgagctggacgcggatgaacaggcagacatctgtgaatcgcttcacgaccacgctgatgagctttaccgcagctgcctcgcgcgtttcggtgatgacggtgaaaacctctgacacatgcagctcccggagacggtcacagcttgtctgtaagcggatgccgggagcagacaagcccgtcagggcgcgtcagcgggtgttggcgggtgtcggggcgcagccatgacccagtcacgtagcgatagcggagtgtatactggcttaactatgcggcatcagagcagattgtactgagagtgcaccatatgcggtgtgaaataccgcacagatgcgtaaggagaaaataccgcatcaggcgctcttccgcttcctcgctcactgactcgctgcgctcggtcgttcggctgcggcgagcggtatcagctcactcaaaggcggtaatacggttatccacagaatcaggggataacgcaggaaagaacatgtgagcaaaaggccagcaaaaggccaggaaccgtaaaaaggccgcgttgctggcgtttttccataggctccgcccccctgacgagcatcacaaaaatcgacgctcaagtcagaggtggcgaaacccgacaggactataaagataccaggcgtttccccctggaagctccctcgtgcgctctcctgttccgaccctgccgcttaccggatacctgtccgcctttctcccttcgggaagcgtggcgctttctcatagctcacgctgtaggtatctcagttcggtgtaggtcgttcgctccaagctgggctgtgtgcacgaaccccccgttcagcccgaccgctgcgccttatccggtaactatcgtcttgagtccaacccggtaagacacgacttatcgccactggcagcagccactggtaacaggattagcagagcgaggtatgtaggcggtgctacagagttcttgaagtggtggcctaactacggctacactagaaggacagtatttggtatctgcgctctgctgaagccagttaccttcggaaaaagagttggtagctcttgatccggcaaacaaaccaccgctggtagcggtggtttttttgtttgcaagcagcagattacgcgcagaaaaaaaggatctcaagaagatcctttgatcttttctacggggtctgacgctcagtggaacgaaaactcacgttaagggattttggtcatgagattatcaaaaaggatcttcacctagatccttttaaattaaaaatgaagttttaaatcaatctaaagtatatatgagtaaacttggtctgacagttaccaatgcttaatcagtgaggcacctatctcagcgatctgtctatttcgttcatccatagttgcctgactccccgtcgtgtagataactacgatacgggagggcttaccatctggccccagtgctgcaatgataccgcgagacccacgctcaccggctccagatttatcagcaataaaccagccagccggaagggccgagcgcagaagtggtcctgcaactttatccgcctccatccagtctattaattgttgccgggaagctagagtaagtagttcgccagttaatagtttgcgcaacgttgttgccattgctgcaggtcgggagcacaggatgacgcctaacaattcattcaagccgacaccgcttcgcggcgcggcttaattcaggagttaaacatcatgagggaagcggtgatcgccgaagtatcgactcaactatcagaggtagttggcgtcatcgagcgccatctcgaaccgacgttgctggccgtacatttgtacggctccgcagtggatggcggcctgaagccacacagtgatattgatttgctggttacggtgaccgtaaggcttgatgaaacaacgcggcgagctttgatcaacgaccttttggaaacttcggcttcccctggagagagcgagattctccgcgctgtagaagtcaccattgttgtgcacgacgacatcattccgtggcgttatccagctaagcgcgaactgcaatttggagaatggcagcgcaatgacattcttgcaggtatcttcgagccagccacgatcgacattgatctggctatcttgctgacaaaagcaagagaacatagcgttgccttggtaggtccagcggcggaggaactctttgatccggttcctgaacaggatctatttgaggcgctaaatgaaaccttaacgctatggaactcgccgcccgactgggctggcgatgagcgaaatgtagtgcttacgttgtcccgcatttggtacagcgcagtaaccggcaaaatcgcgccgaaggatgtcgctgccgactgggcaatggagcgcctgccggcccagtatcagcccgtcatacttgaagctaggcaggcttatcttggacaagaagatcgcttggcctcgcgcgcagatcagttggaagaatttgttcactacgtgaaaggcgagatcaccaaggtagtcggcaaataatgtctaacaattcgttcaagccgacgccgcttcgcggcgcggcttaactcaagcgttagatgctgcaggcatcgtggtgtcacgctcgtcgtttggtatggcttcattcagctccggttcccaacgatcaaggcgagttacatgatcccccatgttgtgcaaaaaagcggttagctccttcggtcctccgatcgaggatttttcggcgctgcgctacgtccgcgaccgcgttgagggatcaagccacagcagcccactcgaccttctagccgacccagacgagccaagggatctttttggaatgctgctccgtcgtcaggctttccgacgtttgggtggttgaacagaagtcattatcgcacggaatgccaagcactcccgaggggaaccctgtggttggcatgcacatacaaatggacgaacggataaaccttttcacgcccttttaaatatccgattattctaataaacgctcttttctcttaggtttacccgccaatatatcctgtcaaacactgatagtttaaactgaaggcgggaaacgacaatctgatccccatcaagctt

SEQ ID NO: 10030 - DNA, 14437 bp, Artificial
  pMON74916
atgtcttcctcgaggcctgcccactcttcaagttcatccagcaggactcgccagagctcccgggcaaggatattagcacaaacaacccttgatgctgaactcaatgcagagtacgaagaatctggtgattcctttgattactccaagttggttgaagcacagcggagcactccacctgagcagcaagggcgatcgggaaaggtcatagcctacttgcagcatattcaaagaggaaagcttatccaaccatttggttgcctgttggcccttgacgagaagagcttcagggtcattgcattcagtgagaatgcacctgaaatgcttacaacggtcagccatgctgtgccaaacgttgatgatcccccgaagctaggaattggtaccaatgtgcgctcccttttcactgaccctggtgctacagcactgcagaaggcacttggatttgctgatgtttctttgctgaatcctatcctggttcagtgcaagacctcaggcaagccattctatgccattgttcacagggcaactggttgtctggtggtagattttgagcctgtgaagcctacagaatttcctgccactgctgctggggctttgcagtcctacaagcttgctgccaaggcaatctccaagatccagtcactactaggtggaagcatggaggccttatgcaataccgtggttaaggaagtctttgacctgacaggttatgacagggttatggcttacaagttccatgaagatgagcatggggaggtctttgctgagatcaccaaacctggtattgagccctatataggcctgcactatccagccactgatatccctcaagctgccaggtttctcttcatgaagaacaaagtcagaatgatctgtgattgccgtgcaagatccgtgaagattattgaagatgaggcactctccattgatattagcttgtgtggttcaactcttagagcaccacatagctgtcaccttaagtatatggagaacatgaactcgattgcatctcttgtcatggctgttgtggtcaatgaaaatgaagaggatgatgaacccgagcctgaacaaccaccacaacagcagaagaagaagaggctgtggggtctcattgtttgccaccatgagagccccagatatgtcccgttcccactgcggtatgcctgtgaattcttggcccaagtgtttgctgtccatgtaaacaaggagtttgaattggagaagcagatacgagagaaaaacattctgcgaatgcaaacaatgctctctgacatgctgttcaaggaatcatctcccttgagtatcgtgtctgggagtccaaatatcatggacctagttaagtgtgatggcgctgctcttttgtatggggacaaagtatggcggcttcaaacggctccaaccgagtctcagattcgtgatattgccttctggctttcagaagttcatggggattccactggcttgagtactgatagcctccaggatgctggatatccaggagctgcttcccttggtgacatgatttgtggaatggcagtggccaagatcacgtccaaggacattcttttctggttcaggtcacatacagctgctgaaatcaaatggggaggtgcaaagcatgatccatctgataaggatgacaacagaaggatgcaccctaggttatcctttaaggctttccttgaggttgtcaagacgaagagtttgccatggagtgactacgagatggatgctattcactcattgcagcttattcttagaggtacactgaatgatgcctcgaagccagcccaggcatctggtttagataaccagatcggtgatctaaaacttgatgggcttgctgaattgcaagcagtgacaagtgaaatggtccgcctgatggaaacagcaactgttccgatcttggcagtagatggcaatggattggtcaatggatggaaccaaaaggtagcggagttgtcaggtctgagagttgatgaggctataggaagacacatacttacacttgtggaggattcttctgtatcacttgttcagaggatgctatatttagctctgcaaggtgagtggaactaaaaggttttaagcacctttactgtctgcaccatttaattactattcttactgttaatagtcaaccctcagaaaaaatgaataaatttattgtattacgtattggtttctgaatatttcatcaattgagcaggcagagaagagaaggaagttcgatttgagctgaaaacacatggctccaagagggatgatggccctgttatcttggtcgtaaatgcttgtgccagtcgtgatcttcatgaccatgttgttggggtgtgctttgtagcccaggacatgactgttcacaagttggtcatggacaaatttactcgggtcgagggggactacaaggcaatcatccacaacccgaacccactcattcctcctatatttggtgctgaccagtttggatggtgctctgagtggaatgcagccatgaccaagcttaccgggtggcacagagatgaagtggttgataagatgctccttggcgaggtttttaacagcagcaatgcttcctgccttctgaagagcaaagatgcctttgtacgtctttgcattgtcatcaacagtgcattagctggtgaagaggcagaaaaggcttcattcggcttctttgaccgcaatgagaaatatgtcgaatgccttctgtcggtgaacaggaaagtaaatgcagatggtgttgtcactggagtgttctgtttcatccatgttcctagtgatgacctgcagcatgcgctacatgtgcagcaagcctctgagcagacagcacaaagaaagttgaaggctttctcgtacatgcgacatgccatcaacaaacctctctcaggtatgctttattctagggaaacactcaagagcacaggtctgaatgaagagcagatgaggcaggttcgcgtcggagacaattgccatcgccagctaagcaagatacttgccgacttggatcaagataacatcactgacaagtaaccttcttgccaagtcttttaaactgttctattaggttcttgtatttatttccgtcttcctcgtaatttgacaattttctgaacagtaggttgatggtatcacttaattttacttcactagctactgaagcttatagccatattcgttacaaccaacttaatatttctgtatcattatgttcacaggtcaagctgcttggatttggatatggctgaatttgtgttgcaagatgtggtggtgtctgctgtaagtcaagtgctgataggttgccaggctaaaggtatcagagttgcttgcaacctgccggagagatccatgaagcaaagggtttacggggatggtatccgactccagcagatcgtctccgacttcctatttgtttcggtgaagttctctcctgctggtggctctgttgacatctcttccaagctgactaagaacagcattggggaaaaccttcacctcatagacttcgaacttaggtatgctgggcatgctagtttgcaagcatacattcatttctgaactggaaagcatgaggtgtgaaggcttaagttactcttgtgtttatggctttatgattttcaggatcaagcaccgaggagcaggagtcccagcggaaatattgtcgcaaatgtatgaggaggacaataaagagcagtcagaggagggcttcagccttgctgtttctagaaaccttctgaggctcatgaatggtgacattcgtcacctcagggaagctggcatgtcaaccttcattctcactgctgaacttgctgctgctccttcagcagttggacgatgatgaatcgattgatccaaagggcgaattctgcatgcgtttggacgtatgctcattcaggttggagccaatttggttgatgtgtgtgcgagttcttgcgagtctgatgagacatctctgtattgtgtttctttccccagtgttttctgtacttgtgtaatcggctaatcgccaacagattcggcgatgaataaatgagaaataaattgttctgattttgagtgcaaaaaaaaaggaattagatctgtgtgtgttttttggatccccggggcggccgctcgagcaggacctgcagaagctagcttgatggggatcagattgtcgtttcccgccttcagtttaaactatcagtgtttgacaggatatattggcgggtaaacctaagagaaaagagcgtttattagaataatcggatatttaaaagggcgtgaaaaggtttatccgttcgtccatttgtatgtgcatgccaaccacagggttcccctcgggagtgcttggcattccgtgcgataatgacttctgttcaaccacccaaacgtcggaaagcctgacgacggagcagcattccaaaaagatcccttggctcgtctgggtcggctagaaggtcgagtgggctgctgtggcttgatccctcaacgcggtcgcggacgtagcgcagcgccgaaaaatcctcgatcggaggaccgaaggagctaaccgcttttttgcacaacatgggggatcatgtaactcgccttgatcgttgggaaccggagctgaatgaagccataccaaacgacgagcgtgacaccacgatgcctgcagcatctaacgcttgagttaagccgcgccgcgaagcggcgtcggcttgaacgaattgttagacattatttgccgactaccttggtgatctcgcctttcacgtagtgaacaaattcttccaactgatctgcgcgcgaggccaagcgatcttcttgtccaagataagcctgcctagcttcaagtatgacgggctgatactgggccggcaggcgctccattgcccagtcggcagcgacatccttcggcgcgattttgccggttactgcgctgtaccaaatgcgggacaacgtaagcactacatttcgctcatcgccagcccagtcgggcggcgagttccatagcgttaaggtttcatttagcgcctcaaatagatcctgttcaggaaccggatcaaagagttcctccgccgctggacctaccaaggcaacgctatgttctcttgcttttgtcagcaagatagccagatcaatgtcgatcgtggctggctcgaagatacctgcaagaatgtcattgcgctgccattctccaaattgcagttcgcgcttagctggataacgccacggaatgatgtcgtcgtgcacaacaatggtgacttctacagcgcggagaatctcgctctctccaggggaagccgaagtttccaaaaggtcgttgatcaaagctcgccgcgttgtttcatcaagccttacggtcaccgtaaccagcaaatcaatatcactgtgtggcttcaggccgccatccactgcggagccgtacaaatgtacggccagcaacgtcggttcgagatggcgctcgatgacgccaactacctctgatagttgagtcgatacttcggcgatcaccgcttccctcatgatgtttaactcctgaattaagccgcgccgcgaagcggtgtcggcttgaatgaattgttaggcgtcatcctgtgctcccgacctgcagcaatggcaacaacgttgcgcaaactattaactggcgaactacttactctagcttcccggcaacaattaatagactggatggaggcggataaagttgcaggaccacttctgcgctcggcccttccggctggctggtttattgctgataaatctggagccggtgagcgtgggtctcgcggtatcattgcagcactggggccagatggtaagccctcccgtatcgtagttatctacacgacggggagtcaggcaactatggatgaacgaaatagacagatcgctgagataggtgcctcactgattaagcattggtaactgtcagaccaagtttactcatatatactttagattgatttaaaacttcatttttaatttaaaaggatctaggtgaagatcctttttgataatctcatgaccaaaatcccttaacgtgagttttcgttccactgagcgtcagaccccgtagaaaagatcaaaggatcttcttgagatcctttttttctgcgcgtaatctgctgcttgcaaacaaaaaaaccaccgctaccagcggtggtttgtttgccggatcaagagctaccaactctttttccgaaggtaactggcttcagcagagcgcagataccaaatactgtccttctagtgtagccgtagttaggccaccacttcaagaactctgtagcaccgcctacatacctcgctctgctaatcctgttaccagtggctgctgccagtggcgataagtcgtgtcttaccgggttggactcaagacgatagttaccggataaggcgcagcggtcgggctgaacggggggttcgtgcacacagcccagcttggagcgaacgacctacaccgaactgagatacctacagcgtgagctatgagaaagcgccacgcttcccgaagggagaaaggcggacaggtatccggtaagcggcagggtcggaacaggagagcgcacgagggagcttccagggggaaacgcctggtatctttatagtcctgtcgggtttcgccacctctgacttgagcgtcgatttttgtgatgctcgtcaggggggcggagcctatggaaaaacgccagcaacgcggcctttttacggttcctggccttttgctggccttttgctcacatgttctttcctgcgttatcccctgattctgtggataaccgtattaccgcctttgagtgagctgataccgctcgccgcagccgaacgaccgagcgcagcgagtcagtgagcgaggaagcggaagagcgcctgatgcggtattttctccttacgcatctgtgcggtatttcacaccgcatatggtgcactctcagtacaatctgctctgatgccgcatagttaagccagtatacactccgctatcgctacgtgactgggtcatggctgcgccccgacacccgccaacacccgctgacgcgccctgacgggcttgtctgctcccggcatccgcttacagacaagctgtgaccgtctccgggagctgcatgtgtcagaggttttcaccgtcatcaccgaaacgcgcgaggcagctgcggtaaagctcatcagcgtggtcgtgaagcgattcacagatgtctgcctgttcatccgcgtccagctcgttgagtttctccagaagcgttaatgtctggcttctgataaagcgggccatgttaagggcggttttttcctgtttggtcactgatgcctccgtgtaagggggatttctgttcatgggggtaatgataccgatgaaacgagagaggatgctcacgatacgggttactgatgatgaacatgcccggttactggaacgttgtgagggtaaacaactggcggtatggatgcggcgggaccagagaaaaatcactcagggtcaatgccagcgcttcgttaatacagatgtaggtgttccacagggtagccagcagcatcctgcgatgcagatccggaacataatggtgcagggcgctgacttccgcgtttccagactttacgaaacacggaaaccgaagaccattcatgttgttgctcaggtcgcagacgttttgcagcagcagtcgcttcacgttcgctcgcgtatcggtgattcattctgctaaccagtaaggcaaccccgccagcctagccgggtcctcaacgacaggagcacgatcatgcgcacccgtggccaggacccaacgctgcccgagatgcgccgcgtgcggctgctggagatggcggacgcgatggatatgttctgccaagggttggtttgcgcattcacagttctccgcaagaattgattggctccaattcttggagtggtgaatccgttagcgaggtgccgccggcttccattcaggtcgaggtggcccggctccatgcaccgcgacgcaacgcggggaggcagacaaggtatagggcggcgcctacaatccatgccaacccgttccatgtgctcgccgaggcggcataaatcgccgtgacgatcagcggtccaatgatcgaagttaggctggtaagagccgcgagcgatccttgaagctgtccctgatggtcgtcatctacctgcctggacagcatggcctgcaacgcgggcatcccgatgccgccggaagcgagaagaatcataatggggaaggccatccagcctcgcgtcgcgaacgccagcaagacgtagcccagcgcgtcggccgccatgccggcgataatggcctgcttctcgccgaaacgtttggtggcgggaccagtgacgaaggcttgagcgagggcgtgcaagattccgaataccgcaagcgacaggccgatcatcgtcgcgctccagcgaaagcggtcctcgccgaaaatgacccagagcgctgccggcacctgtcctacgagttgcatgataaagaagacagtcataagtgcggcgacgatagtcatgccccgcgcccaccggaaggagctgactgggttgaaggctctcaagggcatcggtcgatcgaccctttccgacgctcaccgggctggttgccctcgccgctgggctggcggccgtctatggccctgcaaacgcgccagaaacgccgtcgaagccgtgtgcgagacaccgcggccggccgccggcgttgtggatacctcgcggaaaacttggccctcactgacagatgaggggcggacgttgacacttgaggggccgactcacccggcgcggcgttgacagatgaggggcaggctcgatttcggccggcgacgtggagctggccagcctcgcaaatcggcgaaaacgcctgattttacgcgagtttcccacagatgatgtggacaagcctggggataagtgccctgcggtattgacacttgaggggcgcgactactgacagatgaggggcgcgatccttgacacttgaggggcagagtgctgacagatgaggggcgcacctattgacatttgaggggctgtccacaggcagaaaatccagcatttgcaagggtttccgcccgtttttcggccaccgctaacctgtcttttaacctgcttttaaaccaatatttataaaccttgtttttaaccagggctgcgccctgtgcgcgtgaccgcgcacgccgaaggggggtgcccccccttctcgaaccctcccggcccgctaacgcgggcctcccatccccccaggggctgcgcccctcggccgcgaacggcctcaccccaaaaatggcagccaagctaggaaaagtcccatgtggatcactccgttgccccgtcgctcaccgtgttggggggaaggtgcacatggctcagttctcaatggaaattatctgcctaaccggctcagttctgcgtagaaaccaacatgcaagctccaccgggtgcaaagcggcagcggcggcaggatatattcaattgtaaatggcttcatgtccgggaaatctacatggatcagcaatgagtatgatggtcaatatggagaaaaagaaagagtaattaccaattttttttcaattcaaaaatgtagatgtccgcagcgttattataaaatgaaagtacattttgataaaacgacaaattacgatccgtcgtatttataggcgaaagcaataaacaaattattctaattcggaaatctttatttcgacgtgtctacattcacgtccaaatgggggcttagatgagaaacttcacgatttggcgcgccaaagcttactcgaggtcattcatatgcttgagaagagagtcgggatagtccaaaataaaacaaaggtaagattacctggtcaaaagtgaaaacatcagttaaaaggtggtataaagtaaaatatcggtaataaaaggtggcccaaagtgaaatttactcttttctactattataaaaattgaggatgtttttgtcggtactttgatacgtcatttttgtatgaattggtttttaagtttattcgcttttggaaatgcatatctgtatttgagtcgggttttaagttcgtttgcttttgtaaatacagagggatttgtataagaaatatctttagaaaaacccatatgctaatttgacataatttttgagaaaaatatatattcaggcgaattctcacaatgaacaataataagattaaaatagctttcccccgttgcagcgcatgggtattttttctagtaaaaataaaagataaacttagactcaaaacatttacaaaaacaacccctaaagttcctaaagcccaaagtgctatccacgatccatagcaagcccagcccaacccaacccaacccaacccaccccagtccagccaactggacaatagtctccacacccccccactatcaccgtgagttgtccgcacgcaccgcacgtctcgcagccaaaaaaaaaaagaaagaaaaaaaagaaaaagaaaaaacagcaggtgggtccgggtcgtgggggccggaaacgcgaggaggatcgcgagccagcgacgaggccggccctccctccgcttccaaagaaacgccccccatcgccactatatacatacccccccctctcctcccatccccccaaccctaccaccaccaccaccaccacctccacctcctcccccctcgctgccggacgacgagctcctcccccctccccctccgccgccgccgcgccggtaaccaccccgcccctctcctctttctttctccgtttttttttccgtctcggtctcgatctttggccttggtagtttgggtgggcgagaggcggcttcgtgcgcgcccagatcggtgcgcgggaggggcgggatctcgcggctggggctctcgccggcgtggatccggcccggatctcgcggggaatggggctctcggatgtagatctgcgatccgccgttgttgggggagatgatggggggtttaaaatttccgccgtgctaaacaagatcaggaagaggggaaaagggcactatggtttatatttttatatatttctgctgcttcgtcaggcttagatgtgctagatctttctttcttctttttgtgggtagaatttgaatccctcagcattgttcatcggtagtttttcttttcatgatttgtgacaaatgcagcctcgtgcggagcttttttgtaggtagaagtgatcaaccatggcgcaagttagcagaatctgcaatggtgtgcagaacccatctcttatctccaatctctcgaaatccagtcaacgcaaatctcccttatcggtttctctgaagacgcagcagcatccacgagcttatccgatttcgtcgtcgtggggattgaagaagagtgggatgacgttaattggctctgagcttcgtcctcttaaggtcatgtcttctgtttccacggcgtgcatgcttcacggtgcaagcagccggcccgcaaccgcccgcaaatcctctggcctttccggaaccgtccgcattcccggcgacaagtcgatctcccaccggtccttcatgttcggcggtctcgcgagcggtgaaacgcgcatcaccggccttctggaaggcgaggacgtcatcaatacgggcaaggccatgcaggcgatgggcgcccgcatccgtaaggaaggcgacacctggatcatcgatggcgtcggcaatggcggcctcctggcgcctgaggcgccgctcgatttcggcaatgccgccacgggctgccgcctgacgatgggcctcgtcggggtctacgatttcgacagcaccttcatcggcgacgcctcgctcacaaagcgcccgatgggccgcgtgttgaacccgctgcgcgaaatgggcgtgcaggtgaaatcggaagacggtgaccgtcttcccgttaccttgcgcgggccgaagacgccgacgccgatcacctaccgcgtgccgatggcctccgcacaggtgaagtccgccgtgctgctcgccggcctcaacacgcccggcatcacgacggtcatcgagccgatcatgacgcgcgatcatacggaaaagatgctgcagggctttggcgccaaccttaccgtcgagacggatgcggacggcgtgcgcaccatccgcctggaaggccgcggcaagctcaccggccaagtcatcgacgtgccgggcgacccgtcctcgacggccttcccgctggttgcggccctgcttgttccgggctccgacgtcaccatcctcaacgtgctgatgaaccccacccgcaccggcctcatcctgacgctgcaggaaatgggcgccgacatcgaagtcatcaacccgcgccttgccggcggcgaagacgtggcggacctgcgcgttcgctcctccacgctgaagggcgtcacggtgccggaagaccgcgcgccttcgatgatcgacgaatatccgattctcgctgtcgccgccgccttcgcggaaggggcgaccgtgatgaacggtctggaagaactccgcgtcaaggaaagcgaccgcctctcggccgtcgccaatggcctcaagctcaatggcgtggattgcgatgagggcgagacgtcgctcgtcgtgcgtggccgccctgacggcaaggggctcggcaacgcctcgggcgccgccgtcgccacccatctcgatcaccgcatcgccatgagcttcctcgtcatgggcctcgtgtcggaaaaccctgtcacggtggacgatgccacgatgatcgccacgagcttcccggagttcatggacctgatggccgggctgggcgcgaagatcgaactctccgatacgaaggctgcctgatgagctcgaattcccgatcgttcaaacatttggcaataaagtttcttaagattgaatcctgttgccggtcttgcgatgattatcatataatttctgttgaattacgttaagcatgtaataattaacatgtaatgcatgacgttatttatgagatgggtttttatgattagagtcccgcaattatacatttaatacgcgatagaaaacaaaatatagcgcgcaaactaggataaattatcgcgcgcggtgtcatctatgttactagatcggggatttgcggccgcgttaacaagcttactcgaggtcattcatatgcttgagaagagagtcgggatagtccaaaataaaacaaaggtaagattacctggtcaaaagtgaaaacatcagttaaaaggtggtataaagtaaaatatcggtaataaaaggtggcccaaagtgaaatttactcttttctactattataaaaattgaggatgtttttgtcggtactttgatacgtcatttttgtatgaattggtttttaagtttattcgcttttggaaatgcatatctgtatttgagtcgggttttaagttcgtttgcttttgtaaatacagagggatttgtataagaaatatctttagaaaaacccatatgctaatttgacataatttttgagaaaaatatatattcaggcgaattctcacaatgaacaataataagattaaaatagctttcccccgttgcagcgcatgggtattttttctagtaaaaataaaagataaacttagactcaaaacatttacaaaaacaacccctaaagttcctaaagcccaaagtgctatccacgatccatagcaagcccagcccaacccaacccaacccagcccaccccagtccagccaactggacaatagtctccacacccccccactatcaccgtgagttgtccgcacgcaccgcacgtctcgcagccaaaaaaaaaaagaaagaaaaaaaagaaaaagaaaaaacagcaggtgggtccgggtcgtgggggccggaaacgcgaggaggatcgcgagccagcgacgaggccggccctccctccgcttccaaagaaacgccccccatcgccactatatacatacccccccctctcctcccatccccccaaccctaccaccaccaccaccaccacctccacctcctcccccctcgctgccggacgacgagctcctcccccctccccctccgccgccgccgcgccggtaaccaccccgcccctctcctctttctttctccgtttttttttccgtctcggtctcgatctttggccttggtagtttgggtgggcgagaggcggcttcgtgccgcccagatcggtgcgcgggaggggcgggatctcgcggctggctctcgcccccgtggatccggcccggatctcgcggggaatggggctctcggatgtagatctgcgatccgccgttgttggggccgatgatggggcccttaaaatttccgccgtgctaaacaagatcaggaagaggggaaaagggcactatggtttatatttttatatatttctgctgcttcgtcaggcttagatgtgctagatctttctttcttctttttgtgggtagaatttaatccctcagcattgttcatcggtagtttttcttttcatgattcgtgacaaatgcagcctcgtgcggacgtttttttgtaggtagaagtgatcaac

SEQ ID NO: 10031 - protein, 1530 aa, Artificial
  consensus for SEQ ID NO: 136 and its homologs
  Misc_feature (1)..(1): location 1 can be a gap or Met
  Misc_feature (2)..(2): location 2 can be a gap or Pro
  Misc_feature (3)..(3): location 3 can be a gap or Gly
  Misc_feature (4)..(4): location 4 can be a gap or Asn
  Misc_feature (5)..(5): location 5 can be a gap or Glu
  Misc_feature (6)..(6): location 6 can be a gap or Tyr
  Misc_feature (7)..(7): location 7 can be a gap or Gly
  Misc_feature (8)..(8): location 8 can be a gap or Glu
  Misc_feature (9)..(9): location 9 can be a gap or Arg
  Misc_feature (10)..(10): location 10 can be a gap or Ile
  Misc_feature (11)..(11): location 11 can be a gap or His
  Misc_feature (12)..(12): location 12 can be a gap or Asn
  Misc_feature (13)..(13): location 13 can be a gap or Phe
  Misc_feature (14)..(14): location 14 can be a gap or Phe
  Misc_feature (15)..(15): location 15 can be a gap or Gly
  Misc_feature (16)..(16): location 16 can be a gap or Gln
  Misc_feature (17)..(17): location 17 can be a gap or Glu
  Misc_feature (18)..(18): location 18 can be a gap or Gly
  Misc_feature (19)..(19): location 19 can be a gap or Leu
  Misc_feature (20)..(20): location 20 can be a gap or Ser
  Misc_feature (21)..(21): location 21 can be a gap or Gln
  Misc_feature (22)..(22): location 22 can be a gap or Asp
  Misc_feature (23)..(23): location 23 can be a gap or Ser
  Misc_feature (24)..(24): location 24 can be a gap or His
  Misc_feature (25)..(25): location 25 can be a gap or Gln
  Misc_feature (26)..(26): location 26 can be a gap or Pro
  Misc_feature (27)..(27): location 27 can be a gap or Gln
  Misc_feature (28)..(28): location 28 can be a gap or Ala
  Misc_feature (29)..(29): location 29 can be a gap or Gly
  Misc_feature (30)..(30): location 30 can be a gap or Asp
  Misc_feature (31)..(31): location 31 can be a gap or Gly
  Misc_feature (32)..(32): location 32 can be a gap or Ser
  Misc_feature (33)..(33): location 33 can be a gap or Trp
  Misc_feature (34)..(34): location 34 can be a gap or Ser
  Misc_feature (35)..(35): location 35 can be a gap or Gly
  Misc_feature (36)..(36): location 36 can be a gap or Phe
  Misc_feature (37)..(37): location 37 can be a gap or Arg
  Misc_feature (38)..(38): location 38 can be a gap or Asn
  Misc_feature (39)..(39): location 39 can be a gap or Gly
  Misc_feature (40)..(40): location 40 can be a gap or Leu
  Misc_feature (41)..(41): location 41 can be a gap or Val
  Misc_feature (42)..(42): location 42 can be a gap or Ser
  Misc_feature (43)..(43): location 43 can be a gap or Asn
  Misc_feature (44)..(44): location 44 can be a gap or Gln
  Misc_feature (45)..(45): location 45 can be a gap or Arg
  Misc_feature (46)..(46): location 46 can be a gap or Gln
  Misc_feature (47)..(47): location 47 can be a gap or Ile
  Misc_feature (48)..(48): location 48 can be a gap or Asp
  Misc_feature (49)..(49): location 49 can be a gap or Pro
  Misc_feature (50)..(50): location 50 can be a gap or Ser
  Misc_feature (51)..(51): location 51 can be a gap or Leu
  Misc_feature (52)..(52): location 52 can be a gap or Ile
  Misc_feature (53)..(53): location 53 can be a gap or Ala
  Misc_feature (54)..(54): location 54 can be a gap or Asn
  Misc_feature (55)..(55): location 55 can be a gap or Leu
  Misc_feature (56)..(56): location 56 can be a gap or Lys
  Misc_feature (57)..(57): location 57 can be a gap or Thr
  Misc_feature (58)..(58): location 58 can be a gap or Tyr
  Misc_feature (59)..(59): location 59 can be a gap or Ser
  Misc_feature (60)..(60): location 60 can be a gap or Thr
  Misc_feature (61)..(61): location 61 can be a gap or Gln
  Misc_feature (62)..(62): location 62 can be a gap or Gln
  Misc_feature (63)..(63): location 63 can be a gap or Ser
  Misc_feature (64)..(64): location 64 can be a gap or Val
  Misc_feature (65)..(65): location 65 can be a gap or Asp
  Misc_feature (66)..(66): location 66 can be a gap or Pro
  Misc_feature (67)..(67): location 67 can be a gap or Glu
  Misc_feature (68)..(68): location 68 can be a gap or Arg
  Misc_feature (69)..(69): location 69 can be a gap or Gly
  Misc_feature (70)..(70): location 70 can be a gap or Gln
  Misc_feature (71)..(71): location 71 can be a gap or Ser
  Misc_feature (72)..(72): location 72 can be a gap or Ser
  Misc_feature (73)..(73): location 73 can be a gap or Asn
  Misc_feature (74)..(74): location 74 can be a gap or Ser
  Misc_feature (75)..(75): location 75 can be a gap or Gln
  Misc_feature (76)..(76): location 76 can be a gap or His
  Misc_feature (77)..(77): location 77 can be a gap or Gly
  Misc_feature (78)..(78): location 78 can be a gap or Leu
  Misc_feature (79)..(79): location 79 can be a gap or Asn
  Misc_feature (80)..(80): location 80 can be a gap or Phe
  Misc_feature (81)..(81): location 81 can be a gap or Ala
  Misc_feature (82)..(82): location 82 can be a gap or Gln
  Misc_feature (83)..(83): location 83 can be a gap or Gln
  Misc_feature (84)..(84): location 84 can be a gap or Pro
  Misc_feature (85)..(85): location 85 can be a gap or Met
  Misc_feature (86)..(86): location 86 can be a gap or Arg
  Misc_feature (87)..(87): location 87 can be a gap or Ser
  Misc_feature (88)..(88): location 88 can be a gap or Asp
  Misc_feature (89)..(89): location 89 can be a gap or Tyr
  Misc_feature (90)..(90): location 90 can be a gap or Ser
  Misc_feature (91)..(91): location 91 can be a gap or Arg
  Misc_feature (92)..(92): location 92 can be a gap or Ser
  Misc_feature (93)..(93): location 93 can be a gap or Val
  Misc_feature (94)..(94): location 94 can be a gap or Leu
  Misc_feature (95)..(95): location 95 can be a gap or Arg
  Misc_feature (96)..(96): location 96 can be a gap or Glu
  Misc_feature (97)..(97): location 97 can be a gap or His
  Misc_feature (98)..(98): location 98 can be a gap or Gln
  Misc_feature (99)..(99): location 99 can be a gap or Gln
  Misc_feature (100)..(100): location 100 can be a gap or Ser
  Misc_feature (101)..(101): location 101 can be a gap or Thr
  Misc_feature (102)..(102): location 102 can be a gap or Thr
  Misc_feature (103)..(103): location 103 can be a gap or Gly
  Misc_feature (104)..(104): location 104 can be a gap or Tyr
  Misc_feature (105)..(105): location 105 can be a gap or Met
  Misc_feature (106)..(106): location 106 can be a gap or His
  Misc_feature (107)..(107): location 107 can be a gap or Gly
  Misc_feature (108)..(108): location 108 can be a gap or Asn
  Misc_feature (109)..(109): location 109 can be a gap or Leu
  Misc_feature (110)..(110): location 110 can be a gap or Met
  Misc_feature (111)..(111): location 111 can be a gap or Leu
  Misc_feature (112)..(112): location 112 can be a gap or Gln
  Misc_feature (113)..(113): location 113 can be a gap or Ala
  Misc_feature (114)..(114): location 114 can be a gap or Ser
  Misc_feature (115)..(115): location 115 can be a gap or Pro
  Misc_feature (116)..(116): location 116 can be a gap or Asn
  Misc_feature (117)..(117): location 117 can be a gap or Glu
  Misc_feature (118)..(118): location 118 can be a gap or Gly
  Misc_feature (119)..(119): location 119 can be a gap or Ser
  Misc_feature (120)..(120): location 120 can be a gap or Phe
  Misc_feature (121)..(121): location 121 can be a gap or Val
  Misc_feature (122)..(122): location 122 can be a gap or Gly
  Misc_feature (123)..(123): location 123 can be a gap or Val
  Misc_feature (124)..(124): location 124 can be a gap or Asp
  Misc_feature (125)..(125): location 125 can be a gap or Val
  Misc_feature (126)..(126): location 126 can be a gap or Glu
  Misc_feature (127)..(127): location 127 can be a gap or Ser
  Misc_feature (128)..(128): location 128 can be a gap or Ser
  Misc_feature (129)..(129): location 129 can be a gap or Arg
  Misc_feature (130)..(130): location 130 can be a gap or Asp
  Misc_feature (131)..(131): location 131 can be a gap or Arg
  Misc_feature (132)..(132): location 132 can be a gap or Leu
  Misc_feature (133)..(133): location 133 can be a gap or Ser
  Misc_feature (134)..(134): location 134 can be a gap or Gly
  Misc_feature (135)..(135): location 135 can be a gap or Ser
  Misc_feature (136)..(136): location 136 can be a gap or Gly
  Misc_feature (137)..(137): location 137 can be a gap or Phe
  Misc_feature (138)..(138): location 138 can be a gap or Thr
  Misc_feature (139)..(139): location 139 can be a gap or Leu
  Misc_feature (140)..(140): location 140 can be a gap or Asp
  Misc_feature (141)..(141): location 141 can be a gap or Arg
  Misc_feature (142)..(142): location 142 can be a gap or His
  Misc_feature (143)..(143): location 143 can be a gap or Lys
  Misc_feature (144)..(144): location 144 can be a gap or Thr
  Misc_feature (145)..(145): location 145 can be a gap or Pro
  Misc_feature (146)..(146): location 146 can be a gap or Met
  Misc_feature (147)..(147): location 147 can be a gap or Arg
  Misc_feature (148)..(148): location 148 can be a gap or Phe
  Misc_feature (149)..(149): location 149 can be a gap or Asp
  Misc_feature (150)..(150): location 150 can be a gap or Met
  Misc_feature (151)..(151): location 151 can be a gap or Gly
  Misc_feature (152)..(152): location 152 can be a gap or Glu
  Misc_feature (153)..(153): location 153 can be a gap or Ser
  Misc_feature (154)..(154): location 154 can be a gap or Pro
  Misc_feature (155)..(155): location 155 can be a gap or Val
  Misc_feature (156)..(156): location 156 can be a gap or Asn
  Misc_feature (157)..(157): location 157 can be a gap or Tyr
  Misc_feature (158)..(158): location 158 can be a gap or Asp
  Misc_feature (159)..(159): location 159 can be a gap or Phe
  Misc_feature (160)..(160): location 160 can be a gap or Phe
  Misc_feature (161)..(161): location 161 can be a gap or Gly
  Misc_feature (162)..(162): location 162 can be a gap or Gly
  Misc_feature (163)..(163): location 163 can be a gap or Gln
  Misc_feature (164)..(164): location 164 can be a gap or Gln
  Misc_feature (165)..(165): location 165 can be a gap or Gln
  Misc_feature (166)..(166): location 166 can be a gap or Leu
  Misc_feature (167)..(167): location 167 can be a gap or Asn
  Misc_feature (168)..(168): location 168 can be a gap or Asn
  Misc_feature (169)..(169): location 169 can be a gap or Gln
  Misc_feature (170)..(170): location 170 can be a gap or Leu
  Misc_feature (171)..(171): location 171 can be a gap or Pro
  Misc_feature (172)..(172): location 172 can be a gap or Gly
  Misc_feature (173)..(173): location 173 can be a gap or Met
  Misc_feature (174)..(174): location 174 can be a gap or Ile
  Misc_feature (175)..(175): location 175 can be a gap or Gln
  Misc_feature (176)..(176): location 176 can be a gap or Pro
  Misc_feature (177)..(177): location 177 can be a gap or Phe
  Misc_feature (178)..(178): location 178 can be a gap or Pro
  Misc_feature (179)..(179): location 179 can be a gap or Arg
  Misc_feature (180)..(180): location 180 can be a gap or Gln
  Misc_feature (181)..(181): location 181 can be a gap or Gln
  Misc_feature (182)..(182): location 182 can be a gap or Met
  Misc_feature (183)..(183): location 183 can be a gap or Thr
  Misc_feature (184)..(184): location 184 can be a gap or Phe
  Misc_feature (185)..(185): location 185 can be a gap or Asn
  Misc_feature (186)..(186): location 186 can be a gap or Asp
  Misc_feature (187)..(187): location 187 can be a gap or Met
  Misc_feature (188)..(188): location 188 can be a gap or Gln
  Misc_feature (189)..(189): location 189 can be a gap or Leu
  Misc_feature (190)..(190): location 190 can be a gap or Leu
  Misc_feature (191)..(191): location 191 can be a gap or Lys
  Misc_feature (192)..(192): location 192 can be a gap or Gln
  Misc_feature (193)..(193): location 193 can be a gap or His
  Misc_feature (194)..(194): location 194 can be a gap or Ala
  Misc_feature (195)..(195): location 195 can be a gap or Met
  Misc_feature (196)..(196): location 196 can be a gap or Ala
  Misc_feature (197)..(197): location 197 can be a gap or Lys
  Misc_feature (198)..(198): location 198 can be a gap or Gln
  Misc_feature (199)..(199): location 199 can be a gap or Met
  Misc_feature (200)..(200): location 200 can be a gap or His
  Misc_feature (201)..(201): location 201 can be a gap or Glu
  Misc_feature (202)..(202): location 202 can be a gap or Tyr
  Misc_feature (203)..(203): location 203 can be a gap or Gln
  Misc_feature (204)..(204): location 204 can be a gap or Ile
  Misc_feature (205)..(205): location 205 can be a gap or Gln
  Misc_feature (206)..(206): location 206 can be a gap or Gln
  Misc_feature (207)..(207): location 207 can be a gap or Gln
  Misc_feature (208)..(208): location 208 can be a gap or Leu
  Misc_feature (209)..(209): location 209 can be a gap or Gln
  Misc_feature (210)..(210): location 210 can be a gap or Lys
  Misc_feature (211)..(211): location 211 can be a gap or Gln
  Misc_feature (212)..(212): location 212 can be a gap or Gln
  Misc_feature (213)..(213): location 213 can be a gap or Leu
  Misc_feature (214)..(214): location 214 can be a gap or Glu
  Misc_feature (215)..(215): location 215 can be a gap or Ala
  Misc_feature (216)..(216): location 216 can be a gap or Arg
  Misc_feature (217)..(217): location 217 can be a gap or Gln
  Misc_feature (218)..(218): location 218 can be a gap or Leu
  Misc_feature (219)..(219): location 219 can be a gap or Asn
  Misc_feature (220)..(220): location 220 can be a gap or Ser
  Misc_feature (221)..(221): location 221 can be a gap or Leu
  Misc_feature (222)..(222): location 222 can be a gap or His
  Misc_feature (223)..(223): location 223 can be a gap or Ser
  Misc_feature (224)..(224): location 224 can be a gap or Asn
  Misc_feature (225)..(225): location 225 can be a gap or Ala
  Misc_feature (226)..(226): location 226 can be a gap or Val
  Misc_feature (227)..(227): location 227 can be a gap or Asn
  Misc_feature (228)..(228): location 228 can be a gap or Gly
  Misc_feature (229)..(229): location 229 can be a gap or Ser
  Misc_feature (230)..(230): location 230 can be a gap or Leu
  Misc_feature (231)..(231): location 231 can be a gap or Ser
  Misc_feature (232)..(232): location 232 can be a gap or Ser
  Misc_feature (233)..(233): location 233 can be a gap or Asp
  Misc_feature (234)..(234): location 234 can be a gap or Asn
  Misc_feature (235)..(235): location 235 can be a gap or Gln
  Misc_feature (236)..(236): location 236 can be a gap or Ser
  Misc_feature (237)..(237): location 237 can be a gap or His
  Misc_feature (238)..(238): location 238 can be a gap or Pro
  Misc_feature (239)..(239): location 239 can be a gap or Ser
  Misc_feature (240)..(240): location 240 can be a gap or Ile
  Misc_feature (241)..(241): location 241 can be a gap or Ser
  Misc_feature (242)..(242): location 242 can be a gap or Gly
  Misc_feature (243)..(243): location 243 can be a gap or Val
  Misc_feature (244)..(244): location 244 can be a gap or Pro
  Misc_feature (245)..(245): location 245 can be a gap or Leu
  Misc_feature (246)..(246): location 246 can be a gap or Gln
  Misc_feature (247)..(247): location 247 can be a gap or Asp
  Misc_feature (248)..(248): location 248 can be a gap or Ala
  Misc_feature (249)..(249): location 249 can be a gap or Ser
  Misc_feature (250)..(250): location 250 can be a gap or Asn
  Misc_feature (251)..(251): location 251 can be a gap or Asn
  Misc_feature (252)..(252): location 252 can be a gap or Trp
  Misc_feature (253)..(253): location 253 can be a gap or Leu
  Misc_feature (254)..(254): location 254 can be a gap or Gln
  Misc_feature (255)..(255): location 255 can be a gap or Pro
  Misc_feature (256)..(256): location 256 can be a gap or Asp
  Misc_feature (257)..(257): location 257 can be a gap or Leu
  Misc_feature (258)..(258): location 258 can be a gap or Met
  Misc_feature (259)..(259): location 259 can be a gap or Thr
  Misc_feature (260)..(260): location 260 can be a gap or Gly
  Misc_feature (261)..(261): location 261 can be a gap or Asn
  Misc_feature (262)..(262): location 262 can be a gap or Thr
  Misc_feature (263)..(263): location 263 can be a gap or Asn
  Misc_feature (264)..(264): location 264 can be a gap or Trp
  Misc_feature (265)..(265): location 265 can be a gap or Met
  Misc_feature (266)..(266): location 266 can be a gap or His
  Misc_feature (267)..(267): location 267 can be a gap or Arg
  Misc_feature (268)..(268): location 268 can be a gap or Gly
  Misc_feature (269)..(269): location 269 can be a gap or Ile
  Misc_feature (270)..(270): location 270 can be a gap or Ser
  Misc_feature (271)..(271): location 271 can be a gap or Pro
  Misc_feature (272)..(272): location 272 can be a gap or Ile
  Misc_feature (273)..(273): location 273 can be a gap or Val
  Misc_feature (274)..(274): location 274 can be a gap or Gln
  Misc_feature (275)..(275): location 275 can be a gap or Ser
  Misc_feature (276)..(276): location 276 can be a gap or Ser
  Misc_feature (277)..(277): location 277 can be a gap or Ser
  Misc_feature (278)..(278): location 278 can be a gap or Ser
  Misc_feature (279)..(279): location 279 can be a gap or Gly
  Misc_feature (280)..(280): location 280 can be a gap or Leu
  Misc_feature (281)..(281): location 281 can be a gap or Val
  Misc_feature (282)..(282): location 282 can be a gap or Ile
  Misc_feature (283)..(283): location 283 can be a gap or Thr
  Misc_feature (284)..(284): location 284 can be a gap or Pro
  Misc_feature (285)..(285): location 285 can be a gap or Glu
  Misc_feature (286)..(286): location 286 can be a gap or His
  Misc_feature (287)..(287): location 287 can be a gap or Gly
  Misc_feature (288)..(288): location 288 can be a gap or His
  Misc_feature (289)..(289): location 289 can be a gap or Ala
  Misc_feature (290)..(290): location 290 can be a gap or Asn
  Misc_feature (291)..(291): location 291 can be a gap or Leu
  Misc_feature (292)..(292): location 292 can be a gap or Met
  Misc_feature (293)..(293): location 293 can be a gap or Ala
  Misc_feature (294)..(294): location 294 can be a gap or Gln
  Misc_feature (295)..(295): location 295 can be a gap or Gln
  Misc_feature (296)..(296): location 296 can be a gap or Phe
  Misc_feature (297)..(297): location 297 can be a gap or Glu
  Misc_feature (298)..(298): location 298 can be a gap or Thr
  Misc_feature (299)..(299): location 299 can be a gap or Ser
  Misc_feature (300)..(300): location 300 can be a gap or Leu
  Misc_feature (301)..(301): location 301 can be a gap or Tyr
  Misc_feature (302)..(302): location 302 can be a gap or Gly
  Misc_feature (303)..(303): location 303 can be a gap or Met
  Misc_feature (304)..(304): location 304 can be a gap or Pro
  Misc_feature (305)..(305): location 305 can be a gap or Val
  Misc_feature (306)..(306): location 306 can be a gap or Gly
  Misc_feature (307)..(307): location 307 can be a gap or Gly
  Misc_feature (308)..(308): location 308 can be a gap or Thr
  Misc_feature (309)..(309): location 309 can be a gap or Asp
  Misc_feature (310)..(310): location 310 can be a gap or Ala
  Misc_feature (311)..(311): location 311 can be a gap or Pro
  Misc_feature (312)..(312): location 312 can be a gap or Gln
  Misc_feature (313)..(313): location 313 can be a gap or Asn
  Misc_feature (314)..(314): location 314 can be a gap or Ala
  Misc_feature (315)..(315): location 315 can be a gap or Phe
  Misc_feature (316)..(316): location 316 can be a gap or Ser
  Misc_feature (317)..(317): location 317 can be a gap or Ser
  Misc_feature (318)..(318): location 318 can be a gap or Phe
  Misc_feature (319)..(319): location 319 can be a gap or Gln
  Misc_feature (320)..(320): location 320 can be a gap or Met
  Misc_feature (321)..(321): location 321 can be a gap or Lys
  Misc_feature (322)..(322): location 322 can be a gap or Met
  Misc_feature (323)..(323): location 323 can be a gap or Leu
  Misc_feature (324)..(324): location 324 can be a gap or Ala
  Misc_feature (325)..(325): location 325 can be a gap or Ala
  Misc_feature (326)..(326): location 326 can be a gap or Gln
  Misc_feature (327)..(327): location 327 can be a gap or His
  Misc_feature (328)..(328): location 328 can be a gap or Gly
  Misc_feature (329)..(329): location 329 can be a gap or Ser
  Misc_feature (330)..(330): location 330 can be a gap or Ala
  Misc_feature (331)..(331): location 331 can be a gap or Asn
  Misc_feature (332)..(332): location 332 can be a gap or Met
  Misc_feature (333)..(333): location 333 can be a gap or Ser
  Misc_feature (334)..(334): location 334 can be a gap or Ser
  Misc_feature (335)..(335): location 335 can be a gap or Ser
  Misc_feature (336)..(336): location 336 can be a gap or Leu
  Misc_feature (337)..(337): location 337 can be a gap or Thr
  Misc_feature (338)..(338): location 338 can be a gap or Asn
  Misc_feature (339)..(339): location 339 can be a gap or Gln
  Misc_feature (340)..(340): location 340 can be a gap or Pro
  Misc_feature (341)..(341): location 341 can be a gap or Thr
  Misc_feature (342)..(342): location 342 can be a gap or Ser
  Misc_feature (343)..(343): location 343 can be a gap or Phe
  Misc_feature (344)..(344): location 344 can be a gap or Leu
  Misc_feature (345)..(345): location 345 can be a gap or Asn
  Misc_feature (346)..(346): location 346 can be a gap or Gln
  Misc_feature (347)..(347): location 347 can be a gap or Ser
  Misc_feature (348)..(348): location 348 can be a gap or Asp
  Misc_feature (349)..(349): location 349 can be a gap or Ser
  Misc_feature (350)..(350): location 350 can be a gap or His
  Misc_feature (351)..(351): location 351 can be a gap or Met
  Misc_feature (352)..(352): location 352 can be a gap or Leu
  Misc_feature (353)..(353): location 353 can be a gap or Pro
  Misc_feature (354)..(354): location 354 can be a gap or Arg
  Misc_feature (355)..(355): location 355 can be a gap or Ser
  Misc_feature (356)..(356): location 356 can be a gap or Thr
  Misc_feature (357)..(357): location 357 can be a gap or Tyr
  Misc_feature (358)..(358): location 358 can be a gap or Gln
  Misc_feature (359)..(359): location 359 can be a gap or Glu
  Misc_feature (360)..(360): location 360 can be a gap or Asn
  Misc_feature (361)..(361): location 361 can be a gap or Leu
  Misc_feature (362)..(362): location 362 can be a gap or Tyr
  Misc_feature (363)..(363): location 363 can be a gap or Ser
  Misc_feature (364)..(364): location 364 can be a gap or His
  Misc_feature (365)..(365): location 365 can be a gap or Ile
  Misc_feature (366)..(366): location 366 can be a gap or Ser
  Misc_feature (367)..(367): location 367 can be a gap or Val
  Misc_feature (368)..(368): location 368 can be a gap or Pro
  Misc_feature (369)..(369): location 369 can be a gap or Gly
  Misc_feature (370)..(370): location 370 can be a gap or Ser
  Misc_feature (371)..(371): location 371 can be a gap or Asn
  Misc_feature (372)..(372): location 372 can be a gap or Asp
  Misc_feature (373)..(373): location 373 can be a gap or Arg
  Misc_feature (374)..(374): location 374 can be a gap or Pro
  Misc_feature (375)..(375): location 375 can be a gap or Asn
  Misc_feature (376)..(376): location 376 can be a gap or Phe
  Misc_feature (377)..(377): location 377 can be a gap or Glu
  Misc_feature (378)..(378): location 378 can be a gap or Ser
  Misc_feature (379)..(379): location 379 can be a gap or Phe
  Misc_feature (380)..(380): location 380 can be a gap or Gln
  Misc_feature (381)..(381): location 381 can be a gap or Gln
  Misc_feature (382)..(382): location 382 can be a gap or Asp
  Misc_feature (383)..(383): location 383 can be a gap or Asn
  Misc_feature (384)..(384): location 384 can be a gap or Ser
  Misc_feature (385)..(385): location 385 can be a gap or Gly
  Misc_feature (386)..(386): location 386 can be a gap or Gln
  Misc_feature (387)..(387): location 387 can be a gap or Gln
  Misc_feature (388)..(388): location 388 can be a gap or Asn
  Misc_feature (389)..(389): location 389 can be a gap or Ile
  Misc_feature (390)..(390): location 390 can be a gap or Ser
  Misc_feature (391)..(391): location 391 can be a gap or Gly
  Misc_feature (392)..(392): location 392 can be a gap or Gln
  Misc_feature (393)..(393): location 393 can be a gap or Glu
  Misc_feature (394)..(394): location 394 can be a gap or Glu
  Misc_feature (395)..(395): location 395 can be a gap or Phe
  Misc_feature (396)..(396): location 396 can be a gap or Gly
  Misc_feature (397)..(397): location 397 can be a gap or Gln
  Misc_feature (398)..(398): location 398 can be a gap or Met
  Misc_feature (399)..(399): location 399 can be a gap or Asp
  Misc_feature (400)..(400): location 400 can be a gap or Gly
  Misc_feature (401)..(401): location 401 can be a gap or Ser
  Misc_feature (402)..(402): location 402 can be a gap or Gly
  Misc_feature (403)..(403): location 403 can be a gap or Leu
  Misc_feature (404)..(404): location 404 can be a gap or Ser
  Misc_feature (405)..(405): location 405 can be a gap or Glu
  Misc_feature (406)..(406): location 406 can be a gap or Lys
  Misc_feature (407)..(407): location 407 can be a gap or Ser
  Misc_feature (408)..(408): location 408 can be a gap or Phe
  Misc_feature (409)..(409): location 409 can be a gap or Met
  Misc_feature (410)..(410): location 410 can be a gap or Lys
  Misc_feature (411)..(411): location 411 can be a gap or Val
  Misc_feature (412)..(412): location 412 can be a gap or Pro
  Misc_feature (413)..(413): location 413 can be a gap or Glu
  Misc_feature (414)..(414): location 414 can be a gap or Asn
  Misc_feature (415)..(415): location 415 can be a gap or Ile
  Misc_feature (416)..(416): location 416 can be a gap or Asn
  Misc_feature (417)..(417): location 417 can be a gap or Thr
  Misc_feature (418)..(418): location 418 can be a gap or Leu
  Misc_feature (419)..(419): location 419 can be a gap or Gln
  Misc_feature (420)..(420): location 420 can be a gap or Lys
  Misc_feature (421)..(421): location 421 can be a gap or Ser
  Misc_feature (422)..(422): location 422 can be a gap or Thr
  Misc_feature (423)..(423): location 423 can be a gap or Thr
  Misc_feature (424)..(424): location 424 can be a gap or Leu
  Misc_feature (425)..(425): location 425 can be a gap or Asp
  Misc_feature (426)..(426): location 426 can be a gap or Pro
  Misc_feature (427)..(427): location 427 can be a gap or Thr
  Misc_feature (428)..(428): location 428 can be a gap or Glu
  Misc_feature (429)..(429): location 429 can be a gap or Glu
  Misc_feature (430)..(430): location 430 can be a gap or Lys
  Misc_feature (431)..(431): location 431 can be a gap or Ile
  Misc_feature (432)..(432): location 432 can be a gap or Leu
  Misc_feature (433)..(433): location 433 can be a gap or Phe
  Misc_feature (434)..(434): location 434 can be a gap or Gly
  Misc_feature (435)..(435): location 435 can be a gap or Ser
  Misc_feature (436)..(436): location 436 can be a gap or Asp
  Misc_feature (437)..(437): location 437 can be a gap or Asp
  Misc_feature (438)..(438): location 438 can be a gap or Asn
  Misc_feature (439)..(439): location 439 can be a gap or Leu
  Misc_feature (440)..(440): location 440 can be a gap or Trp
  Misc_feature (441)..(441): location 441 can be a gap or Glu
  Misc_feature (442)..(442): location 442 can be a gap or Ala
  Misc_feature (443)..(443): location 443 can be a gap or Phe
  Misc_feature (444)..(444): location 444 can be a gap or Gly
  Misc_feature (445)..(445): location 445 can be a gap or Asn
  Misc_feature (446)..(446): location 446 can be a gap or Ser
  Misc_feature (447)..(447): location 447 can be a gap or Thr
  Misc_feature (448)..(448): location 448 can be a gap or Asp
  Misc_feature (449)..(449): location 449 can be a gap or Met
  Misc_feature (450)..(450): location 450 can be a gap or Ser
  Misc_feature (451)..(451): location 451 can be a gap or Leu
  Misc_feature (452)..(452): location 452 can be a gap or Thr
  Misc_feature (453)..(453): location 453 can be a gap or Gly
  Misc_feature (454)..(454): location 454 can be a gap or Asn
  Misc_feature (455)..(455): location 455 can be a gap or Leu
  Misc_feature (456)..(456): location 456 can be a gap or Met
  Misc_feature (457)..(457): location 457 can be a gap or Ser
  Misc_feature (458)..(458): location 458 can be a gap or Ser
  Misc_feature (459)..(459): location 459 can be a gap or Ser
  Misc_feature (460)..(460): location 460 can be a gap or Ser
  Misc_feature (461)..(461): location 461 can be a gap or Asp
  Misc_feature (462)..(462): location 462 can be a gap or Leu
  Misc_feature (463)..(463): location 463 can be a gap or Phe
  Misc_feature (464)..(464): location 464 can be a gap or Asp
  Misc_feature (465)..(465): location 465 can be a gap or Ala
  Misc_feature (466)..(466): location 466 can be a gap or Cys
  Misc_feature (467)..(467): location 467 can be a gap or Pro
  Misc_feature (468)..(468): location 468 can be a gap or Ser
  Misc_feature (469)..(469): location 469 can be a gap or Leu
  Misc_feature (470)..(470): location 470 can be a gap or Gln
  Misc_feature (471)..(471): location 471 can be a gap or Ser
  Misc_feature (472)..(472): location 472 can be a gap or Gly
  Misc_feature (473)..(473): location 473 can be a gap or Ser
  Misc_feature (474)..(474): location 474 can be a gap or Trp
  Misc_feature (475)..(475): location 475 can be a gap or Ser
  Misc_feature (476)..(476): location 476 can be a gap or Ala
  Misc_feature (477)..(477): location 477 can be a gap or Leu
  Misc_feature (478)..(478): location 478 can be a gap or Met
  Misc_feature (479)..(479): location 479 can be a gap or Gln
  Misc_feature (480)..(480): location 480 can be a gap or Ser
  Misc_feature (481)..(481): location 481 can be a gap or Ala
  Misc_feature (482)..(482): location 482 can be a gap or Val
  Misc_feature (483)..(483): location 483 can be a gap or Ala
  Misc_feature (484)..(484): location 484 can be a gap or Glu
  Misc_feature (485)..(485): location 485 can be a gap or Thr
  Misc_feature (486)..(486): location 486 can be a gap or Ala
  Misc_feature (487)..(487): location 487 can be a gap or Ser
  Misc_feature (488)..(488): location 488 can be a gap or Asp
  Misc_feature (489)..(489): location 489 can be a gap or Asp
  Misc_feature (490)..(490): location 490 can be a gap or Ala
  Misc_feature (491)..(491): location 491 can be a gap or Gly
  Misc_feature (492)..(492): location 492 can be a gap or Val
  Misc_feature (493)..(493): location 493 can be a gap or His
  Misc_feature (494)..(494): location 494 can be a gap or Glu
  Misc_feature (495)..(495): location 495 can be a gap or Trp
  Misc_feature (496)..(496): location 496 can be a gap or Gly
  Misc_feature (497)..(497): location 497 can be a gap or Ser
  Misc_feature (498)..(498): location 498 can be a gap or Lys
  Misc_feature (499)..(499): location 499 can be a gap or Gln
  Misc_feature (500)..(500): location 500 can be a gap or Gln
  Misc_feature (501)..(501): location 501 can be a gap or Ser
  Misc_feature (502)..(502): location 502 can be a gap or Val
  Misc_feature (503)..(503): location 503 can be a gap or Trp
  Misc_feature (504)..(504): location 504 can be a gap or Ala
  Misc_feature (505)..(505): location 505 can be a gap or Asn
  Misc_feature (506)..(506): location 506 can be a gap or Asn
  Misc_feature (507)..(507): location 507 can be a gap or Ile
  Misc_feature (508)..(508): location 508 can be a gap or Asn
  Misc_feature (509)..(509): location 509 can be a gap or Ala
  Misc_feature (510)..(510): location 510 can be a gap or Pro
  Misc_feature (511)..(511): location 511 can be a gap or His
  Misc_feature (512)..(512): location 512 can be a gap or Pro
  Misc_feature (513)..(513): location 513 can be a gap or Asp
  Misc_feature (514)..(514): location 514 can be a gap or Ser
  Misc_feature (515)..(515): location 515 can be a gap or Arg
  Misc_feature (516)..(516): location 516 can be a gap or Ile
  Misc_feature (517)..(517): location 517 can be a gap or Gly
  Misc_feature (518)..(518): location 518 can be a gap or Asn
  Misc_feature (519)..(519): location 519 can be a gap or Arg
  Misc_feature (520)..(520): location 520 can be a gap or Ala
  Misc_feature (521)..(521): location 521 can be a gap or Gln
  Misc_feature (522)..(522): location 522 can be a gap or Val
  Misc_feature (523)..(523): location 523 can be a gap or Ser
  Misc_feature (524)..(524): location 524 can be a gap or Gly
  Misc_feature (525)..(525): location 525 can be a gap or Gly
  Misc_feature (526)..(526): location 526 can be a gap or His
  Misc_feature (527)..(527): location 527 can be a gap or Thr
  Misc_feature (528)..(528): location 528 can be a gap or Asp
  Misc_feature (529)..(529): location 529 can be a gap or Ser
  Misc_feature (530)..(530): location 530 can be a gap or Thr
  Misc_feature (531)..(531): location 531 can be a gap or Arg
  Misc_feature (532)..(532): location 532 can be a gap or Ser
  Misc_feature (533)..(533): location 533 can be a gap or Thr
  Misc_feature (534)..(534): location 534 can be a gap or Val
  Misc_feature (535)..(535): location 535 can be a gap or Gln
  Misc_feature (536)..(536): location 536 can be a gap or His
  Misc_feature (537)..(537): location 537 can be a gap or Leu
  Misc_feature (538)..(538): location 538 can be a gap or Gln
  Misc_feature (539)..(539): location 539 can be a gap or Asp
  Misc_feature (540)..(540): location 540 can be a gap or Lys
  Misc_feature (541)..(541): location 541 can be a gap or Gly
  Misc_feature (542)..(542): location 542 can be a gap or Asn
  Misc_feature (543)..(543): location 543 can be a gap or Ile
  Misc_feature (544)..(544): location 544 can be a gap or Val
  Misc_feature (545)..(545): location 545 can be a gap or Ser
  Misc_feature (546)..(546): location 546 can be a gap or Asp
  Misc_feature (547)..(547): location 547 can be a gap or His
  Misc_feature (548)..(548): location 548 can be a gap or Gly
  Misc_feature (549)..(549): location 549 can be a gap or Leu
  Misc_feature (550)..(550): location 550 can be a gap or Leu
  Misc_feature (551)..(551): location 551 can be a gap or Glu
  Misc_feature (552)..(552): location 552 can be a gap or Lys
  Misc_feature (553)..(553): location 553 can be a gap or Pro
  Misc_feature (554)..(554): location 554 can be a gap or Met
  Misc_feature (555)..(555): location 555 can be a gap or Thr
  Misc_feature (556)..(556): location 556 can be a gap or Pro
  Misc_feature (557)..(557): location 557 can be a gap or Gln
  Misc_feature (558)..(558): location 558 can be a gap or Ser
  Misc_feature (559)..(559): location 559 can be a gap or Gln
  Misc_feature (560)..(560): location 560 can be a gap or Met
  Misc_feature (561)..(561): location 561 can be a gap or Ala
  Misc_feature (562)..(562): location 562 can be a gap or Gly
  Misc_feature (563)..(563): location 563 can be a gap or Asn
  Misc_feature (564)..(564): location 564 can be a gap or Met
  Misc_feature (565)..(565): location 565 can be a gap or Phe
  Misc_feature (566)..(566): location 566 can be a gap or Gln
  Misc_feature (567)..(567): location 567 can be a gap or Ser
  Misc_feature (568)..(568): location 568 can be a gap or Leu
  Misc_feature (569)..(569): location 569 can be a gap or Ser
  Misc_feature (570)..(570): location 570 can be a gap or Ser
  Misc_feature (571)..(571): location 571 can be a gap or Gly
  Misc_feature (572)..(572): location 572 can be a gap or Ile
  Misc_feature (573)..(573): location 573 can be a gap or Asp
  Misc_feature (574)..(574): location 574 can be a gap or Val
  Misc_feature (575)..(575): location 575 can be a gap or Gln
  Misc_feature (576)..(576): location 576 can be a gap or Asn
  Misc_feature (577)..(577): location 577 can be a gap or Asn
  Misc_feature (578)..(578): location 578 can be a gap or Ser
  Misc_feature (579)..(579): location 579 can be a gap or Cys
  Misc_feature (580)..(580): location 580 can be a gap or Ser
  Misc_feature (581)..(581): location 581 can be a gap or Ile
  Misc_feature (582)..(582): location 582 can be a gap or Gly
  Misc_feature (583)..(583): location 583 can be a gap or Lys
  Misc_feature (584)..(584): location 584 can be a gap or Asn
  Misc_feature (585)..(585): location 585 can be a gap or Glu
  Misc_feature (586)..(586): location 586 can be a gap or Asp
  Misc_feature (587)..(587): location 587 can be a gap or Ile
  Misc_feature (588)..(588): location 588 can be a gap or Asp
  Misc_feature (589)..(589): location 589 can be a gap or Asp
  Misc_feature (590)..(590): location 590 can be a gap or Arg
  Misc_feature (591)..(591): location 591 can be a gap or Leu
  Misc_feature (592)..(592): location 592 can be a gap or Gly
  Misc_feature (593)..(593): location 593 can be a gap or Asn
  Misc_feature (594)..(594): location 594 can be a gap or Trp
  Misc_feature (595)..(595): location 595 can be a gap or Arg
  Misc_feature (596)..(596): location 596 can be a gap or Gly
  Misc_feature (597)..(597): location 597 can be a gap or Ala
  Misc_feature (598)..(598): location 598 can be a gap or Ser
  Misc_feature (599)..(599): location 599 can be a gap or Asn
  Misc_feature (600)..(600): location 600 can be a gap or Pro
  Misc_feature (601)..(601): location 601 can be a gap or Asn
  Misc_feature (602)..(602): location 602 can be a gap or Ser
  Misc_feature (603)..(603): location 603 can be a gap or Ala
  Misc_feature (604)..(604): location 604 can be a gap or Ala
  Misc_feature (605)..(605): location 605 can be a gap or Leu
  Misc_feature (606)..(606): location 606 can be a gap or Met
  Misc_feature (607)..(607): location 607 can be a gap or Glu
  Misc_feature (608)..(608): location 608 can be a gap or Arg
  Misc_feature (609)..(609): location 609 can be a gap or Lys
  Misc_feature (610)..(610): location 610 can be a gap or Asn
  Misc_feature (611)..(611): location 611 can be a gap or His
  Misc_feature (612)..(612): location 612 can be a gap or Phe
  Misc_feature (613)..(613): location 613 can be a gap or Thr
  Misc_feature (614)..(614): location 614 can be a gap or Gln
  Misc_feature (615)..(615): location 615 can be a gap or Asn
  Misc_feature (616)..(616): location 616 can be a gap or Leu
  Misc_feature (617)..(617): location 617 can be a gap or Gln
  Misc_feature (618)..(618): location 618 can be a gap or Met
  Misc_feature (619)..(619): location 619 can be a gap or Gln
  Misc_feature (620)..(620): location 620 can be a gap or Arg
  Misc_feature (621)..(621): location 621 can be a gap or Ala
  Misc_feature (622)..(622): location 622 can be a gap or Ser
  Misc_feature (623)..(623): location 623 can be a gap or Tyr
  Misc_feature (624)..(624): location 624 can be a gap or Gly
  Misc_feature (625)..(625): location 625 can be a gap or Ala
  Misc_feature (626)..(626): location 626 can be a gap or Gly
  Misc_feature (627)..(627): location 627 can be a gap or Asp
  Misc_feature (628)..(628): location 628 can be a gap or Asp
  Misc_feature (629)..(629): location 629 can be a gap or Ser
  Misc_feature (630)..(630): location 630 can be a gap or Arg
  Misc_feature (631)..(631): location 631 can be a gap or Ala
  Misc_feature (632)..(632): location 632 can be a gap or Ser
  Misc_feature (633)..(633): location 633 can be a gap or Arg
  Misc_feature (634)..(634): location 634 can be a gap or Asp
  Misc_feature (635)..(635): location 635 can be a gap or Ile
  Misc_feature (636)..(636): location 636 can be a gap or Gln
  Misc_feature (637)..(637): location 637 can be a gap or Gln
  Misc_feature (638)..(638): location 638 can be a gap or Asn
  Misc_feature (639)..(639): location 639 can be a gap or Ile
  Misc_feature (640)..(640): location 640 can be a gap or Gln
  Misc_feature (641)..(641): location 641 can be a gap or His
  Misc_feature (642)..(642): location 642 can be a gap or His
  Misc_feature (643)..(643): location 643 can be a gap or Leu
  Misc_feature (644)..(644): location 644 can be a gap or Asp
  Misc_feature (645)..(645): location 645 can be a gap or Asn
  Misc_feature (646)..(646): location 646 can be a gap or Asn
  Misc_feature (647)..(647): location 647 can be a gap or Ser
  Misc_feature (648)..(648): location 648 can be a gap or Val
  Misc_feature (649)..(649): location 649 can be a gap or Glu
  Misc_feature (650)..(650): location 650 can be a gap or Lys
  Misc_feature (651)..(651): location 651 can be a gap or Ala
  Misc_feature (652)..(652): location 652 can be a gap or Ile
  Misc_feature (653)..(653): location 653 can be a gap or His
  Misc_feature (654)..(654): location 654 can be a gap or Gln
  Misc_feature (655)..(655): location 655 can be a gap or Leu
  Misc_feature (656)..(656): location 656 can be a gap or Asn
  Misc_feature (657)..(657): location 657 can be a gap or Ser
  Misc_feature (658)..(658): location 658 can be a gap or Gly
  Misc_feature (659)..(659): location 659 can be a gap or Asp
  Misc_feature (660)..(660): location 660 can be a gap or Ser
  Misc_feature (661)..(661): location 661 can be a gap or Ser
  Misc_feature (662)..(662): location 662 can be a gap or Gln
  Misc_feature (663)..(663): location 663 can be a gap or Ile
  Misc_feature (664)..(664): location 664 can be a gap or Leu
  Misc_feature (665)..(665): location 665 can be a gap or Glu
  Misc_feature (666)..(666): location 666 can be a gap or Ser
  Misc_feature (667)..(667): location 667 can be a gap or Tyr
  Misc_feature (668)..(668): location 668 can be a gap or Ala
  Misc_feature (669)..(669): location 669 can be a gap or Ser
  Misc_feature (670)..(670): location 670 can be a gap or Asn
  Misc_feature (671)..(671): location 671 can be a gap or Asn
  Misc_feature (672)..(672): location 672 can be a gap or Val
  Misc_feature (673)..(673): location 673 can be a gap or Ser
  Misc_feature (674)..(674): location 674 can be a gap or Lys
  Misc_feature (675)..(675): location 675 can be a gap or Val
  Misc_feature (676)..(676): location 676 can be a gap or Met
  Misc_feature (677)..(677): location 677 can be a gap or Thr
  Misc_feature (678)..(678): location 678 can be a gap or Glu
  Misc_feature (679)..(679): location 679 can be a gap or Ser
  Misc_feature (680)..(680): location 680 can be a gap or Asn
  Misc_feature (681)..(681): location 681 can be a gap or Glu
  Misc_feature (682)..(682): location 682 can be a gap or Met
  Misc_feature (683)..(683): location 683 can be a gap or Gly
  Misc_feature (684)..(684): location 684 can be a gap or Asn
  Misc_feature (685)..(685): location 685 can be a gap or Ser
  Misc_feature (686)..(686): location 686 can be a gap or Gly
  Misc_feature (687)..(687): location 687 can be a gap or Lys
  Misc_feature (688)..(688): location 688 can be a gap or Glu
  Misc_feature (689)..(689): location 689 can be a gap or Asn
  Misc_feature (690)..(690): location 690 can be a gap or Ser
  Misc_feature (691)..(691): location 691 can be a gap or Ser
  Misc_feature (692)..(692): location 692 can be a gap or Asp
  Misc_feature (693)..(693): location 693 can be a gap or Ser
  Misc_feature (694)..(694): location 694 can be a gap or Phe
  Misc_feature (695)..(695): location 695 can be a gap or Arg
  Misc_feature (696)..(696): location 696 can be a gap or Ser
  Misc_feature (697)..(697): location 697 can be a gap or Lys
  Misc_feature (698)..(698): location 698 can be a gap or Phe
  Misc_feature (699)..(699): location 699 can be a gap or Ser
  Misc_feature (700)..(700): location 700 can be a gap or Pro
  Misc_feature (701)..(701): location 701 can be a gap or Glu
  Misc_feature (702)..(702): location 702 can be a gap or Ser
  Misc_feature (703)..(703): location 703 can be a gap or Leu
  Misc_feature (704)..(704): location 704 can be a gap or Thr
  Misc_feature (705)..(705): location 705 can be a gap or Gln
  Misc_feature (706)..(706): location 706 can be a gap or Val
  Misc_feature (707)..(707): location 707 can be a gap or Asn
  Misc_feature (708)..(708): location 708 can be a gap or Ala
  Misc_feature (709)..(709): location 709 can be a gap or Arg
  Misc_feature (710)..(710): location 710 can be a gap or Asp
  Misc_feature (711)..(711): location 711 can be a gap or Leu
  Misc_feature (712)..(712): location 712 can be a gap or Ser
  Misc_feature (713)..(713): location 713 can be a gap or Val
  Misc_feature (714)..(714): location 714 can be a gap or Leu
  Misc_feature (715)..(715): location 715 can be a gap or Pro
  Misc_feature (716)..(716): location 716 can be a gap or Gly
  Misc_feature (717)..(717): location 717 can be a gap or Gly
  Misc_feature (718)..(718): location 718 can be a gap or Lys
  Misc_feature (719)..(719): location 719 can be a gap or Glu
  Misc_feature (720)..(720): location 720 can be a gap or Thr
  Misc_feature (721)..(721): location 721 can be a gap or Gln
  Misc_feature (722)..(722): location 722 can be a gap or Ser
  Misc_feature (723)..(723): location 723 can be a gap or Pro
  Misc_feature (724)..(724): location 724 can be a gap or Ser
  Misc_feature (725)..(725): location 725 can be a gap or Arg
  Misc_feature (726)..(726): location 726 can be a gap or Ser
  Misc_feature (727)..(727): location 727 can be a gap or Asp
  Misc_feature (728)..(728): location 728 can be a gap or Gly
  Misc_feature (729)..(729): location 729 can be a gap or Leu
  Misc_feature (730)..(730): location 730 can be a gap or Ile
  Misc_feature (731)..(731): location 731 can be a gap or Arg
  Misc_feature (732)..(732): location 732 can be a gap or Asp
  Misc_feature (733)..(733): location 733 can be a gap or Gly
  Misc_feature (734)..(734): location 734 can be a gap or Leu
  Misc_feature (735)..(735): location 735 can be a gap or Asn
  Misc_feature (736)..(736): location 736 can be a gap or His
  Misc_feature (737)..(737): location 737 can be a gap or Lys
  Misc_feature (738)..(738): location 738 can be a gap or Asp
  Misc_feature (739)..(739): location 739 can be a gap or Ser
  Misc_feature (740)..(740): location 740 can be a gap or Ala
  Misc_feature (741)..(741): location 741 can be a gap or Asn
  Misc_feature (742)..(742): location 742 can be a gap or Cys
  Misc_feature (743)..(743): location 743 can be a gap or Met
  Misc_feature (744)..(744): location 744 can be a gap or Leu
  Misc_feature (745)..(745): location 745 can be a gap or Gln
  Misc_feature (746)..(746): location 746 can be a gap or Phe
  Misc_feature (747)..(747): location 747 can be a gap or Gly
  Misc_feature (748)..(748): location 748 can be a gap or Pro
  Misc_feature (749)..(749): location 749 can be a gap or Thr
  Misc_feature (750)..(750): location 750 can be a gap or Ile
  Misc_feature (751)..(751): location 751 can be a gap or Ser
  Misc_feature (752)..(752): location 752 can be a gap or Gln
  Misc_feature (753)..(753): location 753 can be a gap or Ser
  Misc_feature (754)..(754): location 754 can be a gap or Phe
  Misc_feature (755)..(755): location 755 can be a gap or Phe
  Misc_feature (756)..(756): location 756 can be a gap or Asn
  Misc_feature (757)..(757): location 757 can be a gap or Lys
  Misc_feature (758)..(758): location 758 can be a gap or Asn
  Misc_feature (759)..(759): location 759 can be a gap or His
  Misc_feature (760)..(760): location 760 can be a gap or Ala
  Misc_feature (761)..(761): location 761 can be a gap or Val
  Misc_feature (762)..(762): location 762 can be a gap or Ser
  Misc_feature (763)..(763): location 763 can be a gap or Ala
  Misc_feature (764)..(764): location 764 can be a gap or Gly
  Misc_feature (765)..(765): location 765 can be a gap or Ser
  Misc_feature (766)..(766): location 766 can be a gap or Asp
  Misc_feature (767)..(767): location 767 can be a gap or His
  Misc_feature (768)..(768): location 768 can be a gap or Gln
  Misc_feature (769)..(769): location 769 can be a gap or Gln
  Misc_feature (770)..(770): location 770 can be a gap or Ile
  Misc_feature (771)..(771): location 771 can be a gap or Ser
  Misc_feature (772)..(772): location 772 can be a gap or Pro
  Misc_feature (773)..(773): location 773 can be a gap or Gln
  Misc_feature (774)..(774): location 774 can be a gap or Ile
  Misc_feature (775)..(775): location 775 can be a gap or Ala
  Misc_feature (776)..(776): location 776 can be a gap or Pro
  Misc_feature (777)..(777): location 777 can be a gap or Ser
  Misc_feature (778)..(778): location 778 can be a gap or Arg
  Misc_feature (779)..(779): location 779 can be a gap or Phe
  Misc_feature (780)..(780): location 780 can be a gap or Ser
  Misc_feature (781)..(781): location 781 can be a gap or Gln
  Misc_feature (782)..(782): location 782 can be a gap or Tyr
  Misc_feature (783)..(783): location 783 can be a gap or Glu
  Misc_feature (784)..(784): location 784 can be a gap or Ala
  Misc_feature (785)..(785): location 785 can be a gap or Phe
  Misc_feature (786)..(786): location 786 can be a gap or Lys
  Misc_feature (787)..(787): location 787 can be a gap or Asn
  Misc_feature (788)..(788): location 788 can be a gap or Gly
  Misc_feature (789)..(789): location 789 can be a gap or Leu
  Misc_feature (790)..(790): location 790 can be a gap or Val
  Misc_feature (791)..(791): location 791 can be a gap or Gln
  Misc_feature (792)..(792): location 792 can be a gap or Pro
  Misc_feature (793)..(793): location 793 can be a gap or Val
  Misc_feature (794)..(794): location 794 can be a gap or Asn
  Misc_feature (795)..(795): location 795 can be a gap or Asp
  Misc_feature (796)..(796): location 796 can be a gap or Thr
  Misc_feature (797)..(797): location 797 can be a gap or Gly
  Misc_feature (798)..(798): location 798 can be a gap or Arg
  Misc_feature (799)..(799): location 799 can be a gap or Phe
  Misc_feature (800)..(800): location 800 can be a gap or Thr
  Misc_feature (801)..(801): location 801 can be a gap or Leu
  Misc_feature (802)..(802): location 802 can be a gap or Leu
  Misc_feature (803)..(803): location 803 can be a gap or Lys
  Misc_feature (804)..(804): location 804 can be a gap or Ile
  Misc_feature (805)..(805): location 805 can be a gap or Gly
  Misc_feature (806)..(806): location 806 can be a gap or Glu
  Misc_feature (807)..(807): location 807 can be a gap or Arg
  Misc_feature (808)..(808): location 808 can be a gap or Tyr
  Misc_feature (809)..(809): location 809 can be a gap or Ser
  Misc_feature (810)..(810): location 810 can be a gap or Asn
  Misc_feature (811)..(811): location 811 can be a gap or Leu
  Misc_feature (812)..(812): location 812 can be a gap or Gly
  Misc_feature (813)..(813): location 813 can be a gap or Asn
  Misc_feature (814)..(814): location 814 can be a gap or Ser
  Misc_feature (815)..(815): location 815 can be a gap or Asp
  Misc_feature (816)..(816): location 816 can be a gap or Asp
  Misc_feature (817)..(817): location 817 can be a gap or Gly
  Misc_feature (818)..(818): location 818 can be a gap or Leu
  Misc_feature (819)..(819): location 819 can be a gap or His
  Misc_feature (820)..(820): location 820 can be a gap or Ser
  Misc_feature (821)..(821): location 821 can be a gap or Val
  Misc_feature (822)..(822): location 822 can be a gap or Gln
  Misc_feature (823)..(823): location 823 can be a gap or Ser
  Misc_feature (824)..(824): location 824 can be a gap or Ser
  Misc_feature (825)..(825): location 825 can be a gap or Lys
  Misc_feature (826)..(826): location 826 can be a gap or Gln
  Misc_feature (827)..(827): location 827 can be a gap or Leu
  Misc_feature (828)..(828): location 828 can be a gap or Asn
  Misc_feature (829)..(829): location 829 can be a gap or Thr
  Misc_feature (830)..(830): location 830 can be a gap or Ala
  Misc_feature (831)..(831): location 831 can be a gap or Asp
  Misc_feature (832)..(832): location 832 can be a gap or Pro
  Misc_feature (833)..(833): location 833 can be a gap or Gly
  Misc_feature (834)..(834): location 834 can be a gap or Tyr
  Misc_feature (835)..(835): location 835 can be a gap or Ile
  Misc_feature (836)..(836): location 836 can be a gap or Val
  Misc_feature (837)..(837): location 837 can be a gap or His
  Misc_feature (838)..(838): location 838 can be a gap or Met
  Misc_feature (839)..(839): location 839 can be a gap or Gln
  Misc_feature (840)..(840): location 840 can be a gap or Gln
  Misc_feature (841)..(841): location 841 can be a gap or Ile
  Misc_feature (842)..(842): location 842 can be a gap or Ser
  Misc_feature (843)..(843): location 843 can be a gap or Gly
  Misc_feature (844)..(844): location 844 can be a gap or Ser
  Misc_feature (845)..(845): location 845 can be a gap or Thr
  Misc_feature (846)..(846): location 846 can be a gap or Pro
  Misc_feature (847)..(847): location 847 can be a gap or Gly
  Misc_feature (848)..(848): location 848 can be a gap or Val
  Misc_feature (849)..(849): location 849 can be a gap or Glu
  Misc_feature (850)..(850): location 850 can be a gap or Thr
  Misc_feature (851)..(851): location 851 can be a gap or Leu
  Misc_feature (852)..(852): location 852 can be a gap or Ser
  Misc_feature (853)..(853): location 853 can be a gap or Ser
  Misc_feature (854)..(854): location 854 can be a gap or Ala
  Misc_feature (855)..(855): location 855 can be a gap or Ser
  Misc_feature (856)..(856): location 856 can be a gap or Leu
  Misc_feature (857)..(857): location 857 can be a gap or Pro
  Misc_feature (858)..(858): location 858 can be a gap or Cys
  Misc_feature (859)..(859): location 859 can be a gap or Gly
  Misc_feature (860)..(860): location 860 can be a gap or Ala
  Misc_feature (861)..(861): location 861 can be a gap or Thr
  Misc_feature (862)..(862): location 862 can be a gap or Asp
  Misc_feature (863)..(863): location 863 can be a gap or Gln
  Misc_feature (864)..(864): location 864 can be a gap or Leu
  Misc_feature (865)..(865): location 865 can be a gap or Leu
  Misc_feature (866)..(866): location 866 can be a gap or Lys
  Misc_feature (867)..(867): location 867 can be a gap or Val
  Misc_feature (868)..(868): location 868 can be a gap or Tyr
  Misc_feature (869)..(869): location 869 can be a gap or Lys
  Misc_feature (870)..(870): location 870 can be a gap or Pro
  Misc_feature (871)..(871): location 871 can be a gap or Lys
  Misc_feature (872)..(872): location 872 can be a gap or Lys
  Misc_feature (873)..(873): location 873 can be a gap or Arg
  Misc_feature (874)..(874): location 874 can be a gap or Lys
  Misc_feature (875)..(875): location 875 can be a gap or Asn
  Misc_feature (876)..(876): location 876 can be a gap or Val
  Misc_feature (877)..(877): location 877 can be a gap or Thr
  Misc_feature (878)..(878): location 878 can be a gap or Ser
  Misc_feature (879)..(879): location 879 can be a gap or Glu
  Misc_feature (880)..(880): location 880 can be a gap or Leu
  Misc_feature (881)..(881): location 881 can be a gap or Leu
  Misc_feature (882)..(882): location 882 can be a gap or Ser
  Misc_feature (883)..(883): location 883 can be a gap or Trp
  Misc_feature (884)..(884): location 884 can be a gap or Ser
  Misc_feature (885)..(885): location 885 can be a gap or Lys
  Misc_feature (886)..(886): location 886 can be a gap or Glu
  Misc_feature (887)..(887): location 887 can be a gap or Val
  Misc_feature (888)..(888): location 888 can be a gap or Met
  Misc_feature (889)..(889): location 889 can be a gap or Gln
  Misc_feature (890)..(890): location 890 can be a gap or Arg
  Misc_feature (891)..(891): location 891 can be a gap or Pro
  Misc_feature (892)..(892): location 892 can be a gap or Gln
  Misc_feature (893)..(893): location 893 can be a gap or Arg
  Misc_feature (894)..(894): location 894 can be a gap or Leu
  Misc_feature (895)..(895): location 895 can be a gap or Lys
  Misc_feature (896)..(896): location 896 can be a gap or Thr
  Misc_feature (897)..(897): location 897 can be a gap or Leu
  Misc_feature (898)..(898): location 898 can be a gap or Gly
  Misc_feature (899)..(899): location 899 can be a gap or Phe
  Misc_feature (900)..(900): location 900 can be a gap or Leu
  Misc_feature (901)..(901): location 901 can be a gap or Phe
  Misc_feature (902)..(902): location 902 can be a gap or Glu
  Misc_feature (903)..(903): location 903 can be a gap or Ala
  Misc_feature (904)..(904): location 904 can be a gap or Glu
  Misc_feature (905)..(905): location 905 can be a gap or Val
  Misc_feature (906)..(906): location 906 can be a gap or Asp
  Misc_feature (907)..(907): location 907 can be a gap or Trp
  Misc_feature (908)..(908): location 908 can be a gap or Ala
  Misc_feature (909)..(909): location 909 can be a gap or Arg
  Misc_feature (910)..(910): location 910 can be a gap or Ala
  Misc_feature (911)..(911): location 911 can be a gap or Thr
  Misc_feature (912)..(912): location 912 can be a gap or Asn
  Misc_feature (913)..(913): location 913 can be a gap or Arg
  Misc_feature (914)..(914): location 914 can be a gap or Phe
  Misc_feature (915)..(915): location 915 can be a gap or Ala
  Misc_feature (916)..(916): location 916 can be a gap or Glu
  Misc_feature (917)..(917): location 917 can be a gap or Lys
  Misc_feature (918)..(918): location 918 can be a gap or Gly
  Misc_feature (919)..(919): location 919 can be a gap or Leu
  Misc_feature (920)..(920): location 920 can be a gap or Phe
  Misc_feature (921)..(921): location 921 can be a gap or Val
  Misc_feature (922)..(922): location 922 can be a gap or Glu
  Misc_feature (923)..(923): location 923 can be a gap or Phe
  Misc_feature (924)..(924): location 924 can be a gap or Ala
  Misc_feature (925)..(925): location 925 can be a gap or Thr
  Misc_feature (926)..(926): location 926 can be a gap or Leu
  Misc_feature (927)..(927): location 927 can be a gap or Leu
  Misc_feature (928)..(928): location 928 can be a gap or Glu
  Misc_feature (929)..(929): location 929 can be a gap or Asp
  Misc_feature (930)..(930): location 930 can be a gap or Gly
  Misc_feature (931)..(931): location 931 can be a gap or Pro
  Misc_feature (932)..(932): location 932 can be a gap or Pro
  Misc_feature (933)..(933): location 933 can be a gap or Ile
  Misc_feature (934)..(934): location 934 can be a gap or Arg
  Misc_feature (935)..(935): location 935 can be a gap or Ser
  Misc_feature (936)..(936): location 936 can be a gap or Lys
  Misc_feature (937)..(937): location 937 can be a gap or Arg
  Misc_feature (938)..(938): location 938 can be a gap or Arg
  Misc_feature (939)..(939): location 939 can be a gap or Leu
  Misc_feature (940)..(940): location 940 can be a gap or Ile
  Misc_feature (941)..(941): location 941 can be a gap or Tyr
  Misc_feature (942)..(942): location 942 can be a gap or Thr
  Misc_feature (943)..(943): location 943 can be a gap or Thr
  Misc_feature (944)..(944): location 944 can be a gap or Gln
  Misc_feature (945)..(945): location 945 can be a gap or Leu
  Misc_feature (946)..(946): location 946 can be a gap or Met
  Misc_feature (947)..(947): location 947 can be a gap or Gln
  Misc_feature (948)..(948): location 948 can be a gap or Gln
  Misc_feature (949)..(949): location 949 can be a gap or Leu
  Misc_feature (950)..(950): location 950 can be a gap or Phe
  Misc_feature (951)..(951): location 951 can be a gap or Arg
  Misc_feature (952)..(952): location 952 can be a gap or Pro
  Misc_feature (953)..(953): location 953 can be a gap or Leu
  Misc_feature (954)..(954): location 954 can be a gap or Pro
  Misc_feature (955)..(955): location 955 can be a gap or Gly
  Misc_feature (956)..(956): location 956 can be a gap or Arg
  Misc_feature (957)..(957): location 957 can be a gap or Val
  Misc_feature (958)..(958): location 958 can be a gap or Lys
  Misc_feature (959)..(959): location 959 can be a gap or Ser
  Misc_feature (960)..(960): location 960 can be a gap or Leu
  Misc_feature (961)..(961): location 961 can be a gap or Val
  Misc_feature (962)..(962): location 962 can be a gap or Thr
  Misc_feature (963)..(963): location 963 can be a gap or Ser
  Misc_feature (964)..(964): location 964 can be a gap or Tyr
  Misc_feature (965)..(965): location 965 can be a gap or Glu
  Misc_feature (966)..(966): location 966 can be a gap or Phe
  Misc_feature (967)..(967): location 967 can be a gap or Val
  Misc_feature (968)..(968): location 968 can be a gap or Ala
  Misc_feature (969)..(969): location 969 can be a gap or Tyr
  Misc_feature (970)..(970): location 970 can be a gap or Ser
  Misc_feature (971)..(971): location 971 can be a gap or Ala
  Misc_feature (972)..(972): location 972 can be a gap or Ala
  Misc_feature (973)..(973): location 973 can be a gap or Arg
  Misc_feature (974)..(974): location 974 can be a gap or Ala
  Misc_feature (975)..(975): location 975 can be a gap or Ala
  Misc_feature (976)..(976): location 976 can be a gap or Leu
  Misc_feature (977)..(977): location 977 can be a gap or Gly
  Misc_feature (978)..(978): location 978 can be a gap or Asp
  Misc_feature (979)..(979): location 979 can be a gap or Ala
  Misc_feature (980)..(980): location 980 can be a gap or Cys
  Misc_feature (981)..(981): location 981 can be a gap or Ser
  Misc_feature (982)..(982): location 982 can be a gap or Ser
  Misc_feature (983)..(983): location 983 can be a gap or Thr
  Misc_feature (984)..(984): location 984 can be a gap or Ser
  Misc_feature (985)..(985): location 985 can be a gap or Thr
  Misc_feature (986)..(986): location 986 can be a gap or Asp
  Misc_feature (987)..(987): location 987 can be a gap or Arg
  Misc_feature (988)..(988): location 988 can be a gap or Ile
  Misc_feature (989)..(989): location 989 can be a gap or Glu
  Misc_feature (990)..(990): location 990 can be a gap or Gly
  Misc_feature (991)..(991): location 991 can be a gap or Phe
  Misc_feature (992)..(992): location 992 can be a gap or Leu
  Misc_feature (993)..(993): location 993 can be a gap or Leu
  Misc_feature (994)..(994): location 994 can be a gap or Gln
  Misc_feature (995)..(995): location 995 can be a gap or Asn
  Misc_feature (996)..(996): location 996 can be a gap or Asn
  Misc_feature (997)..(997): location 997 can be a gap or Leu
  Misc_feature (998)..(998): location 998 can be a gap or Asn
  Misc_feature (999)..(999): location 999 can be a gap or Pro
  Misc_feature (1000)..(1000): location 1000 can be a gap or Leu
  Misc_feature (1001)..(1001): location 1001 can be a gap or Ser
  Misc_feature (1002)..(1002): location 1002 can be a gap or Glu
  Misc_feature (1003)..(1003): location 1003 can be a gap or Arg
  Misc_feature (1004)..(1004): location 1004 can be a gap or Thr
  Misc_feature (1005)..(1005): location 1005 can be a gap or Glu
  Misc_feature (1006)..(1006): location 1006 can be a gap or Thr
  Misc_feature (1007)..(1007): location 1007 can be a gap or Glu
  Misc_feature (1008)..(1008): location 1008 can be a gap or Lys
  Misc_feature (1009)..(1009): location 1009 can be a gap or Met
  Misc_feature (1010)..(1010): location 1010 can be a gap or Ser
  Misc_feature (1011)..(1011): location 1011 can be a gap or Asp
  Misc_feature (1012)..(1012): location 1012 can be a gap or Gln
  Misc_feature (1013)..(1013): location 1013 can be a gap or Tyr
  Misc_feature (1014)..(1014): location 1014 can be a gap or Ile
  Misc_feature (1015)..(1015): location 1015 can be a gap or Ser
  Misc_feature (1016)..(1016): location 1016 can be a gap or Lys
  Misc_feature (1017)..(1017): location 1017 can be a gap or Ala
  Misc_feature (1018)..(1018): location 1018 can be a gap or Ala
  Misc_feature (1019)..(1019): location 1019 can be a gap or Glu
  Misc_feature (1020)..(1020): location 1020 can be a gap or Asp
  Misc_feature (1021)..(1021): location 1021 can be a gap or Phe
  Misc_feature (1022)..(1022): location 1022 can be a gap or Ile
  Misc_feature (1023)..(1023): location 1023 can be a gap or Ser
  Misc_feature (1024)..(1024): location 1024 can be a gap or Arg
  Misc_feature (1025)..(1025): location 1025 can be a gap or Thr
  Misc_feature (1026)..(1026): location 1026 can be a gap or Lys
  Misc_feature (1027)..(1027): location 1027 can be a gap or Lys
  Misc_feature (1028)..(1028): location 1028 can be a gap or Leu
  Misc_feature (1029)..(1029): location 1029 can be a gap or Glu
  Misc_feature (1030)..(1030): location 1030 can be a gap or Thr
  Misc_feature (1031)..(1031): location 1031 can be a gap or Asp
  Misc_feature (1032)..(1032): location 1032 can be a gap or Phe
  Misc_feature (1033)..(1033): location 1033 can be a gap or Ala
  Misc_feature (1034)..(1034): location 1034 can be a gap or Gly
  Misc_feature (1035)..(1035): location 1035 can be a gap or Leu
  Misc_feature (1036)..(1036): location 1036 can be a gap or Glu
  Misc_feature (1037)..(1037): location 1037 can be a gap or Lys
  Misc_feature (1038)..(1038): location 1038 can be a gap or Gly
  Misc_feature (1039)..(1039): location 1039 can be a gap or Thr
  Misc_feature (1040)..(1040): location 1040 can be a gap or Thr
  Misc_feature (1041)..(1041): location 1041 can be a gap or Ile
  Misc_feature (1042)..(1042): location 1042 can be a gap or Thr
  Misc_feature (1043)..(1043): location 1043 can be a gap or Asp
  Misc_feature (1044)..(1044): location 1044 can be a gap or Leu
  Misc_feature (1045)..(1045): location 1045 can be a gap or Arg
  Misc_feature (1046)..(1046): location 1046 can be a gap or Val
  Misc_feature (1047)..(1047): location 1047 can be a gap or Glu
  Misc_feature (1048)..(1048): location 1048 can be a gap or Val
  Misc_feature (1049)..(1049): location 1049 can be a gap or Gln
  Misc_feature (1050)..(1050): location 1050 can be a gap or Asp
  Misc_feature (1051)..(1051): location 1051 can be a gap or Leu
  Misc_feature (1052)..(1052): location 1052 can be a gap or Glu
  Misc_feature (1053)..(1053): location 1053 can be a gap or Arg
  Misc_feature (1054)..(1054): location 1054 can be a gap or Phe
  Misc_feature (1055)..(1055): location 1055 can be a gap or Ala
  Misc_feature (1056)..(1056): location 1056 can be a gap or Val
  Misc_feature (1057)..(1057): location 1057 can be a gap or Ile
  Misc_feature (1058)..(1058): location 1058 can be a gap or Asn
  Misc_feature (1059)..(1059): location 1059 can be a gap or Arg
  Misc_feature (1060)..(1060): location 1060 can be a gap or Phe
  Misc_feature (1061)..(1061): location 1061 can be a gap or Ala
  Misc_feature (1062)..(1062): location 1062 can be a gap or Ser
  Misc_feature (1063)..(1063): location 1063 can be a gap or Phe
  Misc_feature (1064)..(1064): location 1064 can be a gap or His
  Misc_feature (1065)..(1065): location 1065 can be a gap or Gln
  Misc_feature (1066)..(1066): location 1066 can be a gap or Ser
  Misc_feature (1067)..(1067): location 1067 can be a gap or Ser
  Misc_feature (1068)..(1068): location 1068 can be a gap or Ser
  Misc_feature (1069)..(1069): location 1069 can be a gap or Ser
  Misc_feature (1070)..(1070): location 1070 can be a gap or Met
  Misc_feature (1071)..(1071): location 1071 can be a gap or Asp
  Misc_feature (1072)..(1072): location 1072 can be a gap or Arg
  Misc_feature (1073)..(1073): location 1073 can be a gap or Ser
  Misc_feature (1074)..(1074): location 1074 can be a gap or Val
  Misc_feature (1075)..(1075): location 1075 can be a gap or Ser
  Misc_feature (1076)..(1076): location 1076 can be a gap or Ser
  Misc_feature (1077)..(1077): location 1077 can be a gap or Leu
  Misc_feature (1078)..(1078): location 1078 can be a gap or Arg
  Misc_feature (1079)..(1079): location 1079 can be a gap or Leu
  Misc_feature (1080)..(1080): location 1080 can be a gap or Asn
  Misc_feature (1081)..(1081): location 1081 can be a gap or Pro
  Misc_feature (1082)..(1082): location 1082 can be a gap or Gln
  Misc_feature (1083)..(1083): location 1083 can be a gap or Arg
  Misc_feature (1084)..(1084): location 1084 can be a gap or Tyr
  Misc_feature (1085)..(1085): location 1085 can be a gap or Val
  Misc_feature (1086)..(1086): location 1086 can be a gap or Thr
  Misc_feature (1087)..(1087): location 1087 can be a gap or Val
  Misc_feature (1088)..(1088): location 1088 can be a gap or Ala
  Misc_feature (1089)..(1089): location 1089 can be a gap or Pro
  Misc_feature (1090)..(1090): location 1090 can be a gap or Val
  Misc_feature (1091)..(1091): location 1091 can be a gap or Pro
  Misc_feature (1092)..(1092): location 1092 can be a gap or Arg
  Misc_feature (1093)..(1093): location 1093 can be a gap or His
  Misc_feature (1094)..(1094): location 1094 can be a gap or Ile
  Misc_feature (1095)..(1095): location 1095 can be a gap or Pro
  Misc_feature (1096)..(1096): location 1096 can be a gap or Asp
  Misc_feature (1097)..(1097): location 1097 can be a gap or Arg
  Misc_feature (1098)..(1098): location 1098 can be a gap or Cys
  Misc_feature (1099)..(1099): location 1099 can be a gap or Cys
  Misc_feature (1100)..(1100): location 1100 can be a gap or Lys
  Misc_feature (1101)..(1101): location 1101 can be a gap or Lys
  Misc_feature (1102)..(1102): location 1102 can be a gap or Gln
  Misc_feature (1103)..(1103): location 1103 can be a gap or Gly
  Misc_feature (1104)..(1104): location 1104 can be a gap or Pro
  Misc_feature (1105)..(1105): location 1105 can be a gap or Lys
  Misc_feature (1106)..(1106): location 1106 can be a gap or Ile
  Misc_feature (1107)..(1107): location 1107 can be a gap or Arg
  Misc_feature (1108)..(1108): location 1108 can be a gap or Glu
  Misc_feature (1109)..(1109): location 1109 can be a gap or Ile
  Misc_feature (1110)..(1110): location 1110 can be a gap or Lys
  Misc_feature (1111)..(1111): location 1111 can be a gap or Arg
  Misc_feature (1112)..(1112): location 1112 can be a gap or Glu
  Misc_feature (1113)..(1113): location 1113 can be a gap or Lys
  Misc_feature (1114)..(1114): location 1114 can be a gap or Val
  Misc_feature (1115)..(1115): location 1115 can be a gap or Gly
  Misc_feature (1116)..(1116): location 1116 can be a gap or Phe
  Misc_feature (1117)..(1117): location 1117 can be a gap or His
  Misc_feature (1118)..(1118): location 1118 can be a gap or Ile
  Misc_feature (1119)..(1119): location 1119 can be a gap or Phe
  Misc_feature (1120)..(1120): location 1120 can be a gap or Cys
  Misc_feature (1121)..(1121): location 1121 can be a gap or Ile
  Misc_feature (1122)..(1122): location 1122 can be a gap or Trp
  Misc_feature (1123)..(1123): location 1123 can be a gap or Thr
  Misc_feature (1124)..(1124): location 1124 can be a gap or Glu
  Misc_feature (1125)..(1125): location 1125 can be a gap or Lys
  Misc_feature (1126)..(1126): location 1126 can be a gap or Ser
  Misc_feature (1127)..(1127): location 1127 can be a gap or Leu
  Misc_feature (1128)..(1128): location 1128 can be a gap or Asn
  Misc_feature (1129)..(1129): location 1129 can be a gap or Ser
  Misc_feature (1130)..(1130): location 1130 can be a gap or Thr
  Misc_feature (1131)..(1131): location 1131 can be a gap or Asn
  Misc_feature (1132)..(1132): location 1132 can be a gap or Glu
  Misc_feature (1133)..(1133): location 1133 can be a gap or Gln
  Misc_feature (1134)..(1134): location 1134 can be a gap or Glu
  Misc_feature (1135)..(1135): location 1135 can be a gap or Leu
  Misc_feature (1136)..(1136): location 1136 can be a gap or Lys
  Misc_feature (1137)..(1137): location 1137 can be a gap or Val
  Misc_feature (1138)..(1138): location 1138 can be a gap or Leu
  Misc_feature (1139)..(1139): location 1139 can be a gap or Val
  Misc_feature (1140)..(1140): location 1140 can be a gap or Cys
  Misc_feature (1141)..(1141): location 1141 can be a gap or Tyr
  Misc_feature (1142)..(1142): location 1142 can be a gap or Ser
  Misc_feature (1143)..(1143): location 1143 can be a gap or Arg
  Misc_feature (1144)..(1144): location 1144 can be a gap or Ile
  Misc_feature (1145)..(1145): location 1145 can be a gap or Arg
  Misc_feature (1146)..(1146): location 1146 can be a gap or Glu
  Misc_feature (1147)..(1147): location 1147 can be a gap or Ser
  Misc_feature (1148)..(1148): location 1148 can be a gap or Lys
  Misc_feature (1149)..(1149): location 1149 can be a gap or Thr
  Misc_feature (1150)..(1150): location 1150 can be a gap or Gln
  Misc_feature (1151)..(1151): location 1151 can be a gap or Arg
  Misc_feature (1152)..(1152): location 1152 can be a gap or Gln
  Misc_feature (1153)..(1153): location 1153 can be a gap or Thr
  Misc_feature (1154)..(1154): location 1154 can be a gap or Thr
  Misc_feature (1155)..(1155): location 1155 can be a gap or Ser
  Misc_feature (1156)..(1156): location 1156 can be a gap or Asn
  Misc_feature (1157)..(1157): location 1157 can be a gap or Leu
  Misc_feature (1158)..(1158): location 1158 can be a gap or Trp
  Misc_feature (1159)..(1159): location 1159 can be a gap or Cys
  Misc_feature (1160)..(1160): location 1160 can be a gap or Gly
  Misc_feature (1161)..(1161): location 1161 can be a gap or Asn
  Misc_feature (1162)..(1162): location 1162 can be a gap or Lys
  Misc_feature (1163)..(1163): location 1163 can be a gap or Ser
  Misc_feature (1164)..(1164): location 1164 can be a gap or His
  Misc_feature (1165)..(1165): location 1165 can be a gap or Thr
  Misc_feature (1166)..(1166): location 1166 can be a gap or Arg
  Misc_feature (1167)..(1167): location 1167 can be a gap or Ala
  Misc_feature (1168)..(1168): location 1168 can be a gap or Thr
  Misc_feature (1169)..(1169): location 1169 can be a gap or Ile
  Misc_feature (1170)..(1170): location 1170 can be a gap or Arg
  Misc_feature (1171)..(1171): location 1171 can be a gap or Arg
  Misc_feature (1172)..(1172): location 1172 can be a gap or Gly
  Misc_feature (1173)..(1173): location 1173 can be a gap or Glu
  Misc_feature (1174)..(1174): location 1174 can be a gap or Met
  Misc_feature (1175)..(1175): location 1175 can be a gap or Lys
  Misc_feature (1176)..(1176): location 1176 can be a gap or Ile
  Misc_feature (1177)..(1177): location 1177 can be a gap or Tyr
  Misc_feature (1178)..(1178): location 1178 can be a gap or Pro
  Misc_feature (1179)..(1179): location 1179 can be a gap or Glu
  Misc_feature (1180)..(1180): location 1180 can be a gap or His
  Misc_feature (1181)..(1181): location 1181 can be a gap or Asn
  Misc_feature (1182)..(1182): location 1182 can be a gap or Ala
  Misc_feature (1183)..(1183): location 1183 can be a gap or Gly
  Misc_feature (1184)..(1184): location 1184 can be a gap or Asp
  Misc_feature (1185)..(1185): location 1185 can be a gap or Ala
  Misc_feature (1186)..(1186): location 1186 can be a gap or Glu
  Misc_feature (1187)..(1187): location 1187 can be a gap or Asp
  Misc_feature (1188)..(1188): location 1188 can be a gap or Asn
  Misc_feature (1189)..(1189): location 1189 can be a gap or Gly
  Misc_feature (1190)..(1190): location 1190 can be a gap or Asp
  Misc_feature (1191)..(1191): location 1191 can be a gap or Glu
  Misc_feature (1192)..(1192): location 1192 can be a gap or Ser
  Misc_feature (1193)..(1193): location 1193 can be a gap or Gly
  Misc_feature (1194)..(1194): location 1194 can be a gap or Val
  Misc_feature (1195)..(1195): location 1195 can be a gap or Val
  Misc_feature (1196)..(1196): location 1196 can be a gap or Asn
  Misc_feature (1197)..(1197): location 1197 can be a gap or Gly
  Misc_feature (1198)..(1198): location 1198 can be a gap or Lys
  Misc_feature (1199)..(1199): location 1199 can be a gap or Ile
  Misc_feature (1200)..(1200): location 1200 can be a gap or Leu
  Misc_feature (1201)..(1201): location 1201 can be a gap or Arg
  Misc_feature (1202)..(1202): location 1202 can be a gap or Arg
  Misc_feature (1203)..(1203): location 1203 can be a gap or Tyr
  Misc_feature (1204)..(1204): location 1204 can be a gap or Arg
  Misc_feature (1205)..(1205): location 1205 can be a gap or Pro
  Misc_feature (1206)..(1206): location 1206 can be a gap or Trp
  Misc_feature (1207)..(1207): location 1207 can be a gap or Asn
  Misc_feature (1208)..(1208): location 1208 can be a gap or Val
  Misc_feature (1209)..(1209): location 1209 can be a gap or Arg
  Misc_feature (1210)..(1210): location 1210 can be a gap or Leu
  Misc_feature (1211)..(1211): location 1211 can be a gap or Cys
  Misc_feature (1212)..(1212): location 1212 can be a gap or Arg
  Misc_feature (1213)..(1213): location 1213 can be a gap or Arg
  Misc_feature (1214)..(1214): location 1214 can be a gap or Arg
  Misc_feature (1215)..(1215): location 1215 can be a gap or Leu
  Misc_feature (1216)..(1216): location 1216 can be a gap or Pro
  Misc_feature (1217)..(1217): location 1217 can be a gap or Trp
  Misc_feature (1218)..(1218): location 1218 can be a gap or Ile
  Misc_feature (1219)..(1219): location 1219 can be a gap or Val
  Misc_feature (1220)..(1220): location 1220 can be a gap or His
  Misc_feature (1221)..(1221): location 1221 can be a gap or Arg
  Misc_feature (1222)..(1222): location 1222 can be a gap or Arg
  Misc_feature (1223)..(1223): location 1223 can be a gap or Ser or Met
  Misc_feature (1224)..(1224): location 1224 can be a gap or Val or Ser
  Misc_feature (1225)..(1225): location 1225 can be a gap or Ile or Pro
  Misc_feature (1226)..(1226): location 1226 can be a gap or Val or Ser
  Misc_feature (1227)..(1227): location 1227 can be a gap or Gln or Thr
  Misc_feature (1228)..(1228): location 1228 can be a gap or Phe
  Misc_feature (1229)..(1229): location 1229 can be a gap or Pro
  Misc_feature (1230)..(1230): location 1230 can be a gap or Pro
  Misc_feature (1231)..(1231): location 1231 can be a gap or Pro or Met
  Misc_feature (1232)..(1232): location 1232 can be a gap or Glu or Ala
  Misc_feature (1233)..(1233): location 1233 can be a gap or Ser or Met or Thr
  Misc_feature (1234)..(1234): location 1234 can be a gap or Glu or Pro or Ser
  Misc_feature (1235)..(1235): location 1235 can be a gap or Ala or Ser
  Misc_feature (1236)..(1236): location 1236 can be a gap or Pro or Ala
  Misc_feature (1237)..(1237): location 1237 can be a gap or Ala or Thr
  Misc_feature (1238)..(1238): location 1238 can be a gap or Pro or Ser
  Misc_feature (1239)..(1239): location 1239 can be a gap or Ser or Thr
  Misc_feature (1240)..(1240): location 1240 can be a gap or Ser or Arg
  Misc_feature (1241)..(1241): location 1241 can be a gap or Pro or Arg
  Misc_feature (1242)..(1242): location 1242 can be a gap or Pro or Ser or Gly
  Misc_feature (1243)..(1243): location 1243 can be a gap or Leu or His
  Misc_feature (1244)..(1244): location 1244 can be a gap or Ala or Gln
  Misc_feature (1245)..(1245): location 1245 can be a gap or Glu or Ala or Ser
  Misc_feature (1246)..(1246): location 1246 can be a gap or Ala or Pro or Phe or Ser
  Misc_feature (1247)..(1247): location 1247 can be a gap or Ser or Thr or Gly
  Misc_feature (1248)..(1248): location 1248 can be a gap or Pro or Ser or Thr
  Misc_feature (1249)..(1249): location 1249 can be a gap or Pro or Ser
  Misc_feature (1250)..(1250): location 1250 can be a gap or Pro or Ser
  Misc_feature (1251)..(1251): location 1251 can be a gap or Pro or Ser or Gly or Thr
  Misc_feature (1252)..(1252): location 1252 can be a gap or Pro or Ser
  Misc_feature (1253)..(1253): location 1253 can be a gap or Pro or Phe or Ser
  Misc_feature (1254)..(1254): location 1254 can be a gap or Pro or Ser
  Misc_feature (1255)..(1255): location 1255 can be a gap or Ala or Leu or Ser
  Misc_feature (1256)..(1256): location 1256 can be a gap or Ser
  Misc_feature (1257)..(1257): location 1257 can be a gap or Leu or Met
  Misc_feature (1258)..(1258): location 1258 can be a gap or Arg
  Misc_feature (1259)..(1259): location 1259 can be a gap or Leu or Gln
  Misc_feature (1260)..(1260): location 1260 can be a gap or Trp
  Misc_feature (1261)..(1261): location 1261 can be a gap or Arg
  Misc_feature (1262)..(1262): location 1262 can be a gap or Pro
  Misc_feature (1263)..(1263): location 1263 can be a gap or Ala
  Misc_feature (1264)..(1264): location 1264 can be a gap or Ala
  Misc_feature (1265)..(1265): location 1265 can be a gap or Gln
  Misc_feature (1266)..(1266): location 1266 can be a gap or His or Arg
  Misc_feature (1267)..(1267): location 1267 can be Asn or a gap
  Misc_feature (1268)..(1268): location 1268 can be a gap or Leu or Met
  Misc_feature (1269)..(1269): location 1269 can be a gap or Arg
  Misc_feature (1270)..(1270): location 1270 can be Asn or a gap
  Misc_feature (1271)..(1271): location 1271 can be a gap or Gln
  Misc_feature (1272)..(1272): location 1272 can be a gap or Trp
  Misc_feature (1273)..(1273): location 1273 can be a gap or Ser
  Misc_feature (1274)..(1274): location 1274 can be Asn or a gap or His or Arg
  Misc_feature (1275)..(1275): location 1275 can be a gap or Leu
  Misc_feature (1276)..(1276): location 1276 can be a gap or Leu or Ser
  Misc_feature (1277)..(1277): location 1277 can be Asn or a gap or Ala
  Misc_feature (1278)..(1278): location 1278 can be a gap or Ala or Cys
  Misc_feature (1279)..(1279): location 1279 can be a gap or Lys or Arg
  Misc_feature (1280)..(1280): location 1280 can be a gap or Glu or Gln or Ala or Thr
  Misc_feature (1281)..(1281): location 1281 can be a gap or Gln or Arg
  Misc_feature (1282)..(1282): location 1282 can be a gap or Trp
  Misc_feature (1283)..(1283): location 1283 can be Ile or a gap or Leu
  Misc_feature (1284)..(1284): location 1284 can be Val or a gap or Asp or Ala
  Misc_feature (1285)..(1285): location 1285 can be a gap or Ala
  Misc_feature (1286)..(1286): location 1286 can be Val or a gap or Ala or Cys
  Misc_feature (1287)..(1287): location 1287 can be a gap or Ala or Ser
  Misc_feature (1288)..(1288): location 1288 can be a gap or Asp or Ala or Ser
  Misc_feature (1289)..(1289): location 1289 can be a gap or Gly
  Misc_feature (1290)..(1290): location 1290 can be a gap or Arg
  Misc_feature (1291)..(1291): location 1291 can be a gap or Ala or Ser
  Misc_feature (1292)..(1292): location 1292 can be a gap or His
  Misc_feature (1293)..(1293): location 1293 can be a gap or Ala
  Misc_feature (1294)..(1294): location 1294 can be a gap or Ala or Ser or Thr
  Misc_feature (1295)..(1295): location 1295 can be a gap or Xaa or Leu or Ala
  Misc_feature (1296)..(1296): location 1296 can be a gap or Leu
  Misc_feature (1297)..(1297): location 1297 can be a gap or Val
  Misc_feature (1298)..(1298): location 1298 can be Asn or a gap
  Misc_feature (1299)..(1299): location 1299 can be Val or a gap or Ala or Ser
  Misc_feature (1300)..(1300): location 1300 can be a gap or Tyr or His
  Misc_feature (1301)..(1301): location 1301 can be a gap or Leu
  Misc_feature (1302)..(1302): location 1302 can be a gap or Ser
  Misc_feature (1303)..(1303): location 1303 can be a gap or Gln or Arg or Cys
  Misc_feature (1304)..(1304): location 1304 can be a gap or Lys or Arg or Ser
  Misc_feature (1305)..(1305): location 1305 can be Asn or a gap or Tyr
  Misc_feature (1306)..(1306): location 1306 can be a gap or Met
  Misc_feature (1307)..(1307): location 1307 can be a gap or Pro
  Misc_feature (1308)..(1308): location 1308 can be a gap or Met or Thr or Gly
  Misc_feature (1309)..(1309): location 1309 can be a gap or Met
  Misc_feature (1310)..(1310): location 1310 can be a gap or Asp or Glu
  Misc_feature (1311)..(1311): location 1311 can be a gap or Leu
  Misc_feature (1312)..(1312): location 1312 can be a gap or Gly
  Misc_feature (1313)..(1313): location 1313 can be a gap or Val
  Misc_feature (1314)..(1314): location 1314 can be a gap or Leu
  Misc_feature (1315)..(1315): location 1315 can be a gap or Lys or Ser
  Misc_feature (1316)..(1316): location 1316 can be a gap or Asp
  Misc_feature (1317)..(1317): location 1317 can be Ile or a gap or Met
  Misc_feature (1318)..(1318): location 1318 can be a gap or Xaa or Pro or Phe
  Misc_feature (1319)..(1319): location 1319 can be a gap or Asp or Arg or Gly
  Misc_feature (1320)..(1320): location 1320 can be Ile or a gap
  Misc_feature (1321)..(1321): location 1321 can be a gap or Asp or Arg
  Misc_feature (1322)..(1322): location 1322 can be a gap or Lys or Asp or Glu
  Misc_feature (1323)..(1323): location 1323 can be a gap or Lys or Arg
  Misc_feature (1324)..(1324): location 1324 can be a gap or Ala
  Misc_feature (1325)..(1325): location 1325 can be Asn or a gap or Leu or Ser
  Misc_feature (1326)..(1326): location 1326 can be a gap or Lys or Ala or Ser or Gly
  Misc_feature (1327)..(1327): location 1327 can be a gap or Lys
  Misc_feature (1328)..(1328): location 1328 can be a gap or Leu
  Misc_feature (1329)..(1329): location 1329 can be a gap or Xaa or Ala or Phe
  Misc_feature (1330)..(1330): location 1330 can be a gap or Leu or Arg or Thr
  Misc_feature (1331)..(1331): location 1331 can be a gap or Gln or Arg
  Misc_feature (1332)..(1332): location 1332 can be a gap or Glu or Gln or Arg
  Misc_feature (1333)..(1333): location 1333 can be a gap or Glu or Ser or Cys
  Misc_feature (1334)..(1334): location 1334 can be Asn or a gap or Gln or Ser
  Misc_feature (1335)..(1335): location 1335 can be a gap or Tyr or Ala or Cys
  Misc_feature (1336)..(1336): location 1336 can be a gap or Gln or Ser or Arg
  Misc_feature (1337)..(1337): location 1337 can be Ile or a gap or Glu or Ser or Gly
  Misc_feature (1338)..(1338): location 1338 can be a gap or Lys or Met
  Misc_feature (1339)..(1339): location 1339 can be a gap or Leu
  Misc_feature (1340)..(1340): location 1340 can be a gap or Leu
  Misc_feature (1341)..(1341): location 1341 can be a gap or Ser
  Misc_feature (1342)..(1342): location 1342 can be a gap or Ala or Ser
  Misc_feature (1343)..(1343): location 1343 can be a gap or Tyr
  Misc_feature (1344)..(1344): location 1344 can be a gap or Lys or Arg
  Misc_feature (1345)..(1345): location 1345 can be Glu or Leu
  Misc_feature (1346)..(1346): location 1346 can be Gln or Met
  Misc_feature (1348)..(1348): location 1348 can be Ala or Leu or Arg or Gly or Cys
  Misc_feature (1349)..(1349): location 1349 can be Ile or Val or Gln or Ala
  Misc_feature (1350)..(1350): location 1350 can be Val or Leu or Met or Thr
  Misc_feature (1351)..(1351): location 1351 can be Val or Ala or Ser
  Misc_feature (1352)..(1352): location 1352 can be Tyr or Asp or Glu
  Misc_feature (1353)..(1353): location 1353 can be Leu or Met
  Misc_feature (1354)..(1354): location 1354 can be Ile or Val
  Misc_feature (1355)..(1355): location 1355 can be Asn or Lys or Glu or Arg
  Misc_feature (1356)..(1356): location 1356 can be Val or Ala
  Misc_feature (1358)..(1358): location 1358 can be Arg or His
  Misc_feature (1359)..(1359): location 1359 can be Ala or Ser
  Misc_feature (1360)..(1360): location 1360 can be Leu or Met
  Misc_feature (1361)..(1361): location 1361 can be Lys or Arg
  Misc_feature (1362)..(1362): location 1362 can be Arg or Cys
  Misc_feature (1363)..(1363): location 1363 can be Tyr or Phe
  Misc_feature (1364)..(1364): location 1364 can be Phe or Ser or Thr
  Misc_feature (1366)..(1366): location 1366 can be Val or Leu or Ala or Gly
  Misc_feature (1367)..(1367): location 1367 can be Ala or Ser
  Misc_feature (1368)..(1368): location 1368 can be Asn or Pro or Ala or Ser or Thr
  Misc_feature (1369)..(1369): location 1369 can be Asn or Gly
  Misc_feature (1370)..(1370): location 1370 can be a gap or Ser or Cys
  Misc_feature (1371)..(1371): location 1371 can be Pro or Ser
  Misc_feature (1372)..(1372): location 1372 can be Ile or Leu
  Misc_feature (1373)..(1373): location 1373 can be Ile or Val or Leu or Thr
  Misc_feature (1374)..(1374): location 1374 can be Gln or His or Arg
  Misc_feature (1376)..(1376): location 1376 can be Ser or Thr
  Misc_feature (1377)..(1377): location 1377 can be Tyr or Asp or Glu or Gly
  Misc_feature (1378)..(1378): location 1378 can be Asn or Arg or Thr
  Misc_feature (1379)..(1379): location 1379 can be Lys or Gln or Ser
  Misc_feature (1380)..(1380): location 1380 can be Asp or Glu or Ala
  Misc_feature (1381)..(1381): location 1381 can be Asn or Asp
  Misc_feature (1382)..(1382): location 1382 can be Gln or Leu or Ser or Met
  Misc_feature (1383)..(1383): location 1383 can be Asn or Ser
  Misc_feature (1385)..(1385): location 1385 can be Ala or Leu or Ser
  Misc_feature (1388)..(1388): location 1388 can be Cys or Gly
  Misc_feature (1391)..(1391): location 1391 can be Ile or Ala or Ser
  Misc_feature (1393)..(1393): location 1393 can be Val or Ala or Phe
  Misc_feature (1394)..(1394): location 1394 can be Phe or His or Gly
  Misc_feature (1395)..(1395): location 1395 can be Asn or Lys or Arg or Thr
  Misc_feature (1396)..(1396): location 1396 can be Trp or Phe or Cys
  Misc_feature (1397)..(1397): location 1397 can be Tyr or Trp or Val or Phe or His
  Misc_feature (1398)..(1398): location 1398 can be Asn or Val or Ser
  Misc_feature (1399)..(1399): location 1399 can be Ile or Val or Glu or Met
  Misc_feature (1400)..(1400): location 1400 can be Leu or Met or Ser or Thr
  Misc_feature (1401)..(1401): location 1401 can be Ile or Glu or Ala or Ser
  Misc_feature (1402)..(1402): location 1402 can be Pro or Phe or His
  Misc_feature (1404)..(1404): location 1404 can be Asn or Lys or Ser
  Misc_feature (1405)..(1405): location 1405 can be Leu or Phe or Met
  Misc_feature (1407)..(1407): location 1407 can be Lys or Xaa or Glu or Gln
  Misc_feature (1408)..(1408): location 1408 can be a gap or Glu
  Misc_feature (1409)..(1409): location 1409 can be a gap or Leu
  Misc_feature (1410)..(1410): location 1410 can be a gap or Val
  Misc_feature (1411)..(1411): location 1411 can be a gap or Asp or Glu or Gln
  Misc_feature (1412)..(1412): location 1412 can be a gap or Met
  Misc_feature (1414)..(1414): location 1414 can be Val or a gap or Lys or Xaa or Ser
  Misc_feature (1415)..(1415): location 1415 can be Ile or Val or Met or Arg or Ser
  Misc_feature (1416)..(1416): location 1416 can be Glu or Ser
  Misc_feature (1417)..(1417): location 1417 can be Val or Glu or Leu or Gln
  Misc_feature (1418)..(1418): location 1418 can be Lys or Leu or Met or Cys
  Misc_feature (1419)..(1419): location 1419 can be Leu or Gln or Arg
  Misc_feature (1420)..(1420): location 1420 can be Lys or Leu
  Misc_feature (1421)..(1421): location 1421 can be a gap or Lys or Xaa
  Misc_feature (1422)..(1422): location 1422 can be a gap or Arg
  Misc_feature (1423)..(1423): location 1423 can be a gap or Leu
  Misc_feature (1424)..(1424): location 1424 can be Ile or Leu or Arg
  Misc_feature (1425)..(1425): location 1425 can be Val or Leu
  Misc_feature (1427)..(1427): location 1427 can be Ile or Val or Asp or Glu
  Misc_feature (1428)..(1428): location 1428 can be Leu or Phe or Met
  Misc_feature (1429)..(1429): location 1429 can be Glu or Leu
  Misc_feature (1430)..(1430): location 1430 can be Leu or Phe or Ser
  Misc_feature (1431)..(1431): location 1431 can be Ile or Val or Met
  Misc_feature (1432)..(1432): location 1432 can be Asn or Ala or Ser or Thr
  Misc_feature (1433)..(1433): location 1433 can be Ile or Leu or Phe
  Misc_feature (1434)..(1434): location 1434 can be Lys or Xaa or Ser
  Misc_feature (1435)..(1435): location 1435 can be Tyr or Glu or Thr
  Misc_feature (1436)..(1436): location 1436 can be Asp or Glu or Gly
  Misc_feature (1437)..(1437): location 1437 can be Val or a gap or Thr
  Misc_feature (1438)..(1438): location 1438 can be a gap or Glu or Pro or Gln or Ser
  Misc_feature (1439)..(1439): location 1439 can be Gln or Leu or Ala or His
  Misc_feature (1440)..(1440): location 1440 can be Val or Asp or Pro or Gln
  Misc_feature (1441)..(1441): location 1441 can be Ile or Lys or Ala or Pro or Thr
  Misc_feature (1442)..(1442): location 1442 can be Asn or Gln or Ser
  Misc_feature (1443)..(1443): location 1443 can be Asn or Leu
  Misc_feature (1444)..(1444): location 1444 can be Asn or Glu or His or Ser
  Misc_feature (1446)..(1446): location 1446 can be Ser or Gly
  Misc_feature (1447)..(1447): location 1447 can be Asn or Asp or Thr
  Misc_feature (1448)..(1448): location 1448 can be Glu or Gln
  Misc_feature (1450)..(1450): location 1450 can be Tyr or Phe
  Misc_feature (1451)..(1451): location 1451 can be Asp or His
  Misc_feature (1452)..(1452): location 1452 can be a gap or Asp or Gly
  Misc_feature (1453)..(1453): location 1453 can be a gap or Glu
  Misc_feature (1454)..(1454): location 1454 can be a gap or Phe or Ser
  Misc_feature (1455)..(1455): location 1455 can be Asn or a gap or Lys or Asp
  Misc_feature (1456)..(1456): location 1456 can be a gap or Asp or Lys or Glu or His
  Misc_feature (1457)..(1457): location 1457 can be a gap or Leu or Phe
  Misc_feature (1458)..(1458): location 1458 can be a gap or Gln or Arg or Thr
  Misc_feature (1459)..(1459): location 1459 can be a gap or Asp or Lys or Ser or Arg
  Misc_feature (1460)..(1460): location 1460 can be Ile or a gap or Cys
  Misc_feature (1461)..(1461): location 1461 can be Asn or a gap or Ser or Gly
  Misc_feature (1462)..(1462): location 1462 can be a gap or Leu
  Misc_feature (1463)..(1463): location 1463 can be Tyr or a gap or Gln or Leu or Gly
  Misc_feature (1464)..(1464): location 1464 can be a gap or Ser or Cys
  Misc_feature (1465)..(1465): location 1465 can be Val or a gap or Met or Gly
  Misc_feature (1466)..(1466): location 1466 can be Val or a gap or Asp or Glu
  Misc_feature (1467)..(1467): location 1467 can be Val or a gap or Ala or Ser or Thr
  Misc_feature (1468)..(1468): location 1468 can be a gap or Tyr or Ala or Phe or His
  Misc_feature (1469)..(1469): location 1469 can be a gap or Lys or Ala or Pro or Ser or Gly
  Misc_feature (1470)..(1470): location 1470 can be a gap or Pro or Leu
  Misc_feature (1471)..(1471): location 1471 can be Val or a gap or Pro
  Misc_feature (1472)..(1472): location 1472 can be a gap or Lys or Glu or Pro or Leu
  Misc_feature (1473)..(1473): location 1473 can be Asn or a gap or Pro
  Misc_feature (1474)..(1474): location 1474 can be a gap or Trp or Arg
  Misc_feature (1475)..(1475): location 1475 can be Val or a gap or Lys or Leu or Ser or Cys
  Misc_feature (1476)..(1476): location 1476 can be a gap or Lys or Ala or Arg
  Misc_feature (1477)..(1477): location 1477 can be Asp or Glu or Gly
  Misc_feature (1478)..(1478): location 1478 can be Tyr or Val or Arg or Gly
  Misc_feature (1479)..(1479): location 1479 can be Asn or Lys or Leu or Ser
  Misc_feature (1480)..(1480): location 1480 can be Ile or Lys or Gln or Ser or Gly
  Misc_feature (1481)..(1481): location 1481 can be Ala or Ser or Gly
  Misc_feature (1482)..(1482): location 1482 can be Ile or Trp or Gln or Ser or Arg
  Misc_feature (1483)..(1483): location 1483 can be Asp or Gln or Ser or Arg
  Misc_feature (1484)..(1484): location 1484 can be a gap or Ala or Ser
  Misc_feature (1485)..(1485): location 1485 can be Ile or a gap or Leu
  Misc_feature (1486)..(1486): location 1486 can be a gap or Arg or Ser
  Misc_feature (1487)..(1487): location 1487 can be Pro or Phe or His
  Misc_feature (1488)..(1488): location 1488 can be Asp or Thr or Gly
  Misc_feature (1489)..(1489): location 1489 can be Asn or Gln or His
  Misc_feature (1490)..(1490): location 1490 can be Gln or Leu or Thr
  Misc_feature (1492)..(1492): location 1492 can be Asn or Leu or Ser or Thr
  Misc_feature (1493)..(1493): location 1493 can be Pro or Ala or His
  Misc_feature (1495)..(1495): location 1495 can be Ile or Val
  Misc_feature (1498)..(1498): location 1498 can be Ile or Val
  Misc_feature (1502)..(1502): location 1502 can be Ser or Thr
  Misc_feature (1504)..(1504): location 1504 can be Leu or His
  Misc_feature (1506)..(1506): location 1506 can be Asn or Glu
  Misc_feature (1507)..(1507): location 1507 can be Val or Met
  Misc_feature (1509)..(1509): location 1509 can be Ile or Met
  Misc_feature (1510)..(1510): location 1510 can be Asn or Asp or Lys or Ser
  Misc_feature (1511)..(1511): location 1511 can be Xaa or Leu or Arg or Thr
  Misc_feature (1512)..(1512): location 1512 can be a gap or Pro or His or Ser
  Misc_feature (1513)..(1513): location 1513 can be Glu or Ser or Arg
  Misc_feature (1514)..(1514): location 1514 can be Ile or Val or Met
  Misc_feature (1515)..(1515): location 1515 can be Ile or Asp or Gly
  Misc_feature (1516)..(1516): location 1516 can be Glu or Ala
  Misc_feature (1517)..(1517): location 1517 can be Ile or Met
  Misc_feature (1518)..(1518): location 1518 can be Lys or Leu or Phe
  Misc_feature (1519)..(1519): location 1519 can be Glu or Ala or Phe
  Misc_feature (1520)..(1520): location 1520 can be Ile or Leu
  Misc_feature (1521)..(1521): location 1521 can be Val or Leu
  Misc_feature (1522)..(1522): location 1522 can be a gap or Glu or Gly
  Misc_feature (1523)..(1523): location 1523 can be a gap or Glu
  Misc_feature (1524)..(1524): location 1524 can be a gap or Glu
  Misc_feature (1525)..(1525): location 1525 can be Ile or a gap or Met
  Misc_feature (1526)..(1526): location 1526 can be a gap or Lys or Gln or Arg
  Misc_feature (1527)..(1527): location 1527 can be Ile or a gap or Val
  Misc_feature (1528)..(1528): location 1528 can be a gap or Lys or Thr
  Misc_feature (1529)..(1529): location 1529 can be a gap or Leu or Phe
  Misc_feature (1530)..(1530): location 1530 can be a gap or Ser or Arg
XXXXXXXXXXXXXXXXXXXXXXXXXXXXXXXXXXXXXXXXXXXXXXXXXXXXXXXXXXXXXXXXXXXXXXXXXXXXXXXXXXXXXXXXXXXXXXXXXXXXXXXXXXXXXXXXXXXXXXXXXXXXXXXXXXXXXXXXXXXXXXXXXXXXXXXXXXXXXXXXXXXXXXXXXXXXXXXXXXXXXXXXXXXXXXXXXXXXXXXXXXXXXXXXXXXXXXXXXXXXXXXXXXXXXXXXXXXXXXXXXXXXXXXXXXXXXXXXXXXXXXXXXXXXXXXXXXXXXXXXXXXXXXXXXXXXXXXXXXXXXXXXXXXXXXXXXXXXXXXXXXXXXXXXXXXXXXXXXXXXXXXXXXXXXXXXXXXXXXXXXXXXXXXXXXXXXXXXXXXXXXXXXXXXXXXXXXXXXXXXXXXXXXXXXXXXXXXXXXXXXXXXXXXXXXXXXXXXXXXXXXXXXXXXXXXXXXXXXXXXXXXXXXXXXXXXXXXXXXXXXXXXXXXXXXXXXXXXXXXXXXXXXXXXXXXXXXXXXXXXXXXXXXXXXXXXXXXXXXXXXXXXXXXXXXXXXXXXXXXXXXXXXXXXXXXXXXXXXXXXXXXXXXXXXXXXXXXXXXXXXXXXXXXXXXXXXXXXXXXXXXXXXXXXXXXXXXXXXXXXXXXXXXXXXXXXXXXXXXXXXXXXXXXXXXXXXXXXXXXXXXXXXXXXXXXXXXXXXXXXXXXXXXXXXXXXXXXXXXXXXXXXXXXXXXXXXXXXXXXXXXXXXXXXXXXXXXXXXXXXXXXXXXXXXXXXXXXXXXXXXXXXXXXXXXXXXXXXXXXXXXXXXXXXXXXXXXXXXXXXXXXXXXXXXXXXXXXXXXXXXXXXXXXXXXXXXXXXXXXXXXXXXXXXXXXXXXXXXXXXXXXXXXXXXXXXXXXXXXXXXXXXXXXXXXXXXXXXXXXXXXXXXXXXXXXXXXXXXXXXXXXXXXXXXXXXXXXXXXXXXXXXXXXXXXXXXXXXXXXXXXXXXXXXXXXXXXXXXXXXXXXXXXXXXXXXXXXXXXXXXXXXXXXXXXXXXXXXXXXXXXXXXXXXXXXXXXXXXXXXXXXXXXXXXXXXXXXXXXXXXXXXXXXXXXXXXXXXXXXXXXXXXXXXXXXXXXXXXXXXXXXXXXXXXXXXXXXXXXXXXXXXXXXXXXXXXXXXXXXXXXXXXXXXXXXXXXXXXXXXXXXXXXXXXXXXXXXXXXXXXXXXXXXXXXXXXXXXXXXXXXXXXXXXXXXXXXXXXXXXXXXXXXXXXXXSXSSSXRLWRPAAQRNXRNQWSXLSXXXXQWXXAXXXGRXHAXXLVNXXLSXXXMPXMXLGVLXDMXXIXXKAXXKLXXXXXXYXXXLLSXYKEMVXXXXXXVXASXSMRCFXKXXXXXXXXQFSXXXXXXNDXGDGGGXPVFXXXSVXXFEXXAXELVXMFXXEXXLKXXXXLLXXXXIXLXXXVXXXXXLXWXDELYDGEXXXLXXXXLXSXXXXXPXXXXXXXXXXXXXXXXXXNXPXXEVLQVYLTTWXAXXNIXXXRXDEIXXLVXEEXXXXXX

SEQ ID NO: 10032 - protein, 1440 aa, Artificial
  Misc_feature (1)..(1): location 1 can be a gap or Met
  Misc_feature (2)..(2): location 2 can be a gap or Asp
  Misc_feature (3)..(3): location 3 can be a gap or Ser
  Misc_feature (4)..(4): location 4 can be a gap or Pro
  Misc_feature (5)..(5): location 5 can be a gap or Pro
  Misc_feature (6)..(6): location 6 can be a gap or Pro
  Misc_feature (7)..(7): location 7 can be a gap or Pro
  Misc_feature (8)..(8): location 8 can be a gap or Arg
  Misc_feature (9)..(9): location 9 can be a gap or Glu
  Misc_feature (10)..(10): location 10 can be a gap or Glu
  Misc_feature (11)..(11): location 11 can be a gap or Val
  Misc_feature (12)..(12): location 12 can be a gap or Val
  Misc_feature (13)..(13): location 13 can be a gap or Val
  Misc_feature (14)..(14): location 14 can be a gap or Phe
  Misc_feature (15)..(15): location 15 can be a gap or Ala
  Misc_feature (16)..(16): location 16 can be a gap or Val
  Misc_feature (17)..(17): location 17 can be a gap or Asn
  Misc_feature (18)..(18): location 18 can be a gap or Ser
  Misc_feature (19)..(19): location 19 can be a gap or Glu
  Misc_feature (20)..(20): location 20 can be a gap or Arg
  Misc_feature (21)..(21): location 21 can be a gap or Phe or Met
  Misc_feature (22)..(22): location 22 can be a gap or Glu or Met or Gly
  Misc_feature (23)..(23): location 23 can be a gap or Leu or Ser or Gly
  Misc_feature (24)..(24): location 24 can be a gap or Glu or Arg or Ser
  Misc_feature (25)..(25): location 25 can be a gap or Glu or Ala or Arg
  Misc_feature (26)..(26): location 26 can be a gap or Asp or Ala
  Misc_feature (27)..(27): location 27 can be a gap or Ala or Met or Gly
  Misc_feature (28)..(28): location 28 can be a gap or Ala or Gly
  Misc_feature (29)..(29): location 29 can be a gap or Asp or Glu or Ala
  Misc_feature (30)..(30): location 30 can be a gap or Ala or Pro or Arg
  Misc_feature (31)..(31): location 31 can be a gap or Ala or Pro or Gly
  Misc_feature (32)..(32): location 32 can be a gap or Val or Glu or Ala
  Misc_feature (33)..(33): location 33 can be a gap or Val or Ser
  Misc_feature (34)..(34): location 34 can be a gap or Val or Leu
  Misc_feature (35)..(35): location 35 can be a gap or Ala or Leu or Thr
  Misc_feature (36)..(36): location 36 can be a gap or Val or Glu
  Misc_feature (37)..(37): location 37 can be Asn or a gap or Phe
  Misc_feature (38)..(38): location 38 can be a gap or Leu or Gly
  Misc_feature (39)..(39): location 39 can be a gap or Glu or Met or Arg
  Misc_feature (40)..(40): location 40 can be a gap or Ser or Arg
  Misc_feature (41)..(41): location 41 can be a gap or Tyr or Asp or Arg
  Misc_feature (42)..(42): location 42 can be a gap or Glu or Cys or Thr
  Misc_feature (43)..(43): location 43 can be Asn or a gap or Ala or Arg
  Misc_feature (44)..(44): location 44 can be a gap or Val or Phe or Ser
  Misc_feature (45)..(45): location 45 can be a gap or Thr or Gly
  Misc_feature (46)..(46): location 46 can be a gap or Val or Gly
  Misc_feature (47)..(47): location 47 can be a gap or Asp or Ala or Gly
  Misc_feature (48)..(48): location 48 can be a gap or Lys or Glu or Pro
  Misc_feature (49)..(49): location 49 can be a gap or Leu or Arg or Ser
  Misc_feature (50)..(50): location 50 can be a gap or Met or Arg or Gly or Thr
  Misc_feature (51)..(51): location 51 can be a gap or Pro or Cys or Thr
  Misc_feature (52)..(52): location 52 can be Asn or a gap or Leu or Gly
  Misc_feature (53)..(53): location 53 can be a gap or Glu or Ala or Leu
  Misc_feature (54)..(54): location 54 can be a gap or Glu or Arg or Gly
  Misc_feature (55)..(55): location 55 can be a gap or Lys or Ala or Phe
  Misc_feature (56)..(56): location 56 can be a gap or Ala or Leu or Thr
  Misc_feature (57)..(57): location 57 can be a gap or Asp or Arg or Thr
  Misc_feature (58)..(58): location 58 can be a gap or Ala or Pro or Thr
  Misc_feature (59)..(59): location 59 can be a gap or Pro or Gln or Arg
  Misc_feature (60)..(60): location 60 can be a gap or Pro or Thr
  Misc_feature (61)..(61): location 61 can be Val or a gap or Pro or Thr
  Misc_feature (62)..(62): location 62 can be a gap or Val or Ala or Phe or Arg
  Misc_feature (63)..(63): location 63 can be a gap or Ala or Leu or Arg
  Misc_feature (64)..(64): location 64 can be a gap or Pro or Gly
  Misc_feature (65)..(65): location 65 can be a gap or Pro or Ser
  Misc_feature (66)..(66): location 66 can be a gap or Lys or Pro or Gly
  Misc_feature (67)..(67): location 67 can be a gap or Leu or Arg or Gly
  Misc_feature (68)..(68): location 68 can be a gap or Ala or Leu or Gly
  Misc_feature (69)..(69): location 69 can be a gap or Leu or Phe or Cys
  Misc_feature (70)..(70): location 70 can be a gap or Arg or Cys or Gly
  Misc_feature (71)..(71): location 71 can be a gap or Glu or Phe or Cys
  Misc_feature (72)..(72): location 72 can be a gap or Arg or Gly
  Misc_feature (73)..(73): location 73 can be a gap or Gly
  Misc_feature (74)..(74): location 74 can be a gap or Cys
  Misc_feature (75)..(75): location 75 can be a gap or Gly
  Misc_feature (76)..(76): location 76 can be a gap or Ala
  Misc_feature (77)..(77): location 77 can be a gap or Cys
  Misc_feature (78)..(78): location 78 can be a gap or Val or Ala
  Misc_feature (79)..(79): location 79 can be Ile or a gap or Val
  Misc_feature (80)..(80): location 80 can be a gap or Val or Leu
  Misc_feature (81)..(81): location 81 can be Ile or a gap or Val
  Misc_feature (82)..(82): location 82 can be a gap or Ala or Ser
  Misc_feature (83)..(83): location 83 can be a gap or Lys or Ala
  Misc_feature (84)..(84): location 84 can be a gap or Tyr
  Misc_feature (85)..(85): location 85 can be Asn or a gap or Asp
  Misc_feature (86)..(86): location 86 can be a gap or Pro or Ala
  Misc_feature (87)..(87): location 87 can be a gap or Val or Lys or Glu or Ala
  Misc_feature (88)..(88): location 88 can be a gap or Ala or Thr
  Misc_feature (89)..(89): location 89 can be a gap or Asp
  Misc_feature (90)..(90): location 90 can be a gap or Glu
  Misc_feature (91)..(91): location 91 can be a gap or Val
  Misc_feature (92)..(92): location 92 can be a gap or Ala or Thr
  Misc_feature (93)..(93): location 93 can be a gap or Glu or Ser or His
  Misc_feature (94)..(94): location 94 can be a gap or Ala or Phe
  Misc_feature (95)..(95): location 95 can be Asn or a gap or Ala or Ser
  Misc_feature (96)..(96): location 96 can be a gap or Val or Ala
  Misc_feature (97)..(97): location 97 can be a gap or Ser
  Misc_feature (98)..(98): location 98 can be a gap or Ser
  Misc_feature (99)..(99): location 99 can be a gap or Cys
  Misc_feature (100)..(100): location 100 can be a gap or Leu
  Misc_feature (101)..(101): location 101 can be a gap or Thr
  Misc_feature (102)..(102): location 102 can be a gap or Leu
  Misc_feature (103)..(103): location 103 can be a gap or Ala or Leu
  Misc_feature (104)..(104): location 104 can be Tyr or a gap or Arg or Gly
  Misc_feature (105)..(105): location 105 can be a gap or Ser or Gly
  Misc_feature (106)..(106): location 106 can be Ile or a gap or Leu
  Misc_feature (107)..(107): location 107 can be a gap or His
  Misc_feature (108)..(108): location 108 can be a gap or Phe or His
  Misc_feature (109)..(109): location 109 can be a gap or Arg or Cys
  Misc_feature (110)..(110): location 110 can be a gap or Ala or Ser
  Misc_feature (111)..(111): location 111 can be Ile or a gap or Val
  Misc_feature (112)..(112): location 112 can be Ile or a gap or Thr
  Misc_feature (113)..(113): location 113 can be a gap or Thr
  Misc_feature (114)..(114): location 114 can be a gap or Ser or Thr
  Misc_feature (115)..(115): location 115 can be a gap or Glu
  Misc_feature (116)..(116): location 116 can be a gap or Gly
  Misc_feature (117)..(117): location 117 can be Ile or a gap or Leu
  Misc_feature (118)..(118): location 118 can be a gap or Gly
  Misc_feature (119)..(119): location 119 can be Asn or a gap or Ser
  Misc_feature (120)..(120): location 120 can be a gap or Ser or Thr
  Misc_feature (121)..(121): location 121 can be a gap or Lys or Arg
  Misc_feature (122)..(122): location 122 can be a gap or Asp or Arg
  Misc_feature (123)..(123): location 123 can be a gap or Gly
  Misc_feature (124)..(124): location 124 can be a gap or Leu or Phe
  Misc_feature (125)..(125): location 125 can be a gap or His
  Misc_feature (126)..(126): location 126 can be a gap or Pro or Ala
  Misc_feature (127)..(127): location 127 can be Ile or a gap or Val or Leu
  Misc_feature (128)..(128): location 128 can be a gap or Gln or His
  Misc_feature (129)..(129): location 129 can be a gap or Lys or Glu or Arg
  Misc_feature (130)..(130): location 130 can be a gap or Arg
  Misc_feature (131)..(131): location 131 can be a gap or Leu or Met
  Misc_feature (132)..(132): location 132 can be a gap or Ala or Ser
  Misc_feature (133)..(133): location 133 can be a gap or Gly
  Misc_feature (134)..(134): location 134 can be a gap or Phe
  Misc_feature (135)..(135): location 135 can be a gap or His
  Misc_feature (136)..(136): location 136 can be a gap or Ala
  Misc_feature (137)..(137): location 137 can be a gap or Ser
  Misc_feature (138)..(138): location 138 can be a gap or Gln
  Misc_feature (139)..(139): location 139 can be a gap or Cys
  Misc_feature (140)..(140): location 140 can be a gap or Gly
  Misc_feature (141)..(141): location 141 can be a gap or Phe
  Misc_feature (142)..(142): location 142 can be a gap or Cys
  Misc_feature (143)..(143): location 143 can be a gap or Thr
  Misc_feature (144)..(144): location 144 can be a gap or Pro
  Misc_feature (145)..(145): location 145 can be a gap or Gly
  Misc_feature (146)..(146): location 146 can be a gap or Val or Met
  Misc_feature (147)..(147): location 147 can be a gap or Cys
  Misc_feature (148)..(148): location 148 can be Val or a gap or Met
  Misc_feature (149)..(149): location 149 can be a gap or Ser
  Misc_feature (150)..(150): location 150 can be Ile or a gap or Leu
  Misc_feature (151)..(151): location 151 can be a gap or Tyr or Ala or Phe
  Misc_feature (152)..(152): location 152 can be a gap or Ser or Gly
  Misc_feature (153)..(153): location 153 can be a gap or Ala or Ser
  Misc_feature (154)..(154): location 154 can be a gap or Leu
  Misc_feature (155)..(155): location 155 can be Val or a gap or Ala
  Misc_feature (156)..(156): location 156 can be Asn or a gap or Lys or Ala
  Misc_feature (157)..(157): location 157 can be a gap or Ala
  Misc_feature (158)..(158): location 158 can be a gap or Asp or Glu
  Misc_feature (159)..(159): location 159 can be a gap or Lys or Arg
  Misc_feature (160)..(160): location 160 can be a gap or Ala or Cys
  Misc_feature (161)..(161): location 161 can be a gap or Ala or Ser
  Misc_feature (162)..(162): location 162 can be a gap or Lys or Ser or Gly
  Misc_feature (163)..(163): location 163 can be Asn or a gap or Ala or Ser or Arg
  Misc_feature (164)..(164): location 164 can be a gap or Lys or Ala or Pro or Gly
  Misc_feature (165)..(165): location 165 can be a gap or Lys or Ala or Pro or Ser
  Misc_feature (166)..(166): location 166 can be a gap or Lys or Pro
  Misc_feature (167)..(167): location 167 can be a gap or Asp or Ala or Pro
  Misc_feature (168)..(168): location 168 can be a gap or Ala or Pro or Thr
  Misc_feature (169)..(169): location 169 can be a gap or Pro or Ser
  Misc_feature (170)..(170): location 170 can be a gap or Ala or Thr
  Misc_feature (171)..(171): location 171 can be a gap or Pro or Ala
  Misc_feature (172)..(172): location 172 can be a gap or Lys or Glu or Pro
  Misc_feature (173)..(173): location 173 can be a gap or Gly
  Misc_feature (174)..(174): location 174 can be a gap or Phe
  Misc_feature (175)..(175): location 175 can be a gap or Ser
  Misc_feature (176)..(176): location 176 can be a gap or Lys or Arg
  Misc_feature (177)..(177): location 177 can be Ile or a gap or Leu
  Misc_feature (178)..(178): location 178 can be a gap or Ser or Thr
  Misc_feature (179)..(179): location 179 can be Val or a gap or Ala
  Misc_feature (180)..(180): location 180 can be a gap or Ala or Ser
  Misc_feature (181)..(181): location 181 can be a gap or Asp or Glu
  Misc_feature (182)..(182): location 182 can be a gap or Ala
  Misc_feature (183)..(183): location 183 can be a gap or Glu
  Misc_feature (184)..(184): location 184 can be a gap or Lys or Arg
  Misc_feature (185)..(185): location 185 can be a gap or Ala or Ser
  Misc_feature (186)..(186): location 186 can be a gap or Val or Phe
  Misc_feature (187)..(187): location 187 can be a gap or Ala or Ser
  Misc_feature (188)..(188): location 188 can be a gap or Gly
  Misc_feature (189)..(189): location 189 can be Asn or a gap
  Misc_feature (190)..(190): location 190 can be a gap or Leu or Met
  Misc_feature (191)..(191): location 191 can be a gap or Cys
  Misc_feature (192)..(192): location 192 can be a gap or Arg
  Misc_feature (193)..(193): location 193 can be a gap or Cys
  Misc_feature (194)..(194): location 194 can be a gap or Thr
  Misc_feature (195)..(195): location 195 can be a gap or Gly
  Misc_feature (196)..(196): location 196 can be a gap or Tyr
  Misc_feature (197)..(197): location 197 can be a gap or Arg
  Misc_feature (198)..(198): location 198 can be a gap or Pro
  Misc_feature (199)..(199): location 199 can be Ile or a gap
  Misc_feature (200)..(200): location 200 can be a gap or Val or Leu or Ala
  Misc_feature (201)..(201): location 201 can be a gap or Asp
  Misc_feature (202)..(202): location 202 can be a gap or Ala
  Misc_feature (203)..(203): location 203 can be a gap or Cys
  Misc_feature (204)..(204): location 204 can be a gap or Lys
  Misc_feature (205)..(205): location 205 can be a gap or Ser
  Misc_feature (206)..(206): location 206 can be a gap or Phe
  Misc_feature (207)..(207): location 207 can be a gap or Ala
  Misc_feature (208)..(208): location 208 can be a gap or Ala or Ser
  Misc_feature (209)..(209): location 209 can be a gap or Asp
  Misc_feature (210)..(210): location 210 can be a gap or Val
  Misc_feature (211)..(211): location 211 can be a gap or Asp
  Misc_feature (212)..(212): location 212 can be a gap or Leu
  Misc_feature (213)..(213): location 213 can be a gap or Glu
  Misc_feature (214)..(214): location 214 can be a gap or Asp
  Misc_feature (215)..(215): location 215 can be a gap or Leu
  Misc_feature (216)..(216): location 216 can be a gap or Gly
  Misc_feature (217)..(217): location 217 can be a gap or Leu
  Misc_feature (218)..(218): location 218 can be Asn or a gap
  Misc_feature (219)..(219): location 219 can be Ile or a gap or Ala or Ser or Cys
  Misc_feature (220)..(220): location 220 can be a gap or Phe
  Misc_feature (221)..(221): location 221 can be a gap or Trp
  Misc_feature (222)..(222): location 222 can be Asn or a gap or Lys
  Misc_feature (223)..(223): location 223 can be a gap or Lys
  Misc_feature (224)..(224): location 224 can be a gap or Gly
  Misc_feature (225)..(225): location 225 can be Val or a gap or Asp or Ala
  Misc_feature (226)..(226): location 226 can be a gap or Lys or Asp or Ala
  Misc_feature (227)..(227): location 227 can be a gap or Asp or His or Gly or Thr
  Misc_feature (228)..(228): location 228 can be a gap or Glu or Pro or Ala
  Misc_feature (229)..(229): location 229 can be a gap or Asp or His or Ser or Arg
  Misc_feature (230)..(230): location 230 can be a gap or Val or Pro or Ala
  Misc_feature (231)..(231): location 231 can be a gap or Asp or Ser or Thr
  Misc_feature (232)..(232): location 232 can be Ile or a gap or Val or Lys
  Misc_feature (233)..(233): location 233 can be Asn or a gap or Leu or Thr or Gly
  Misc_feature (234)..(234): location 234 can be a gap or Lys or Pro
  Misc_feature (235)..(235): location 235 can be a gap or Pro or Leu
  Misc_feature (236)..(236): location 236 can be a gap or Tyr or Pro
  Misc_feature (237)..(237): location 237 can be a gap or Lys or Ala
  Misc_feature (238)..(238): location 238 can be a gap or Tyr or Glu or Ser
  Misc_feature (239)..(239): location 239 can be Tyr or a gap or Arg or Ser
  Misc_feature (240)..(240): location 240 can be a gap or Ser or Cys or Thr or Gly
  Misc_feature (241)..(241): location 241 can be Ile or a gap or Leu or Thr or Gly
  Misc_feature (242)..(242): location 242 can be a gap or Ala or Gly
  Misc_feature (243)..(243): location 243 can be a gap or Asp or Ala or Gly
  Misc_feature (244)..(244): location 244 can be a gap or Val or Phe or Gly
  Misc_feature (245)..(245): location 245 can be Ile or a gap or Ala or Pro or Cys
  Misc_feature (246)..(246): location 246 can be a gap or Glu or Cys or Thr
  Misc_feature (247)..(247): location 247 can be a gap or Phe or Thr
  Misc_feature (248)..(248): location 248 can be a gap or Leu or Pro or Phe
  Misc_feature (249)..(249): location 249 can be a gap or Lys or Glu or Pro
  Misc_feature (250)..(250): location 250 can be a gap or Asp or Phe
  Misc_feature (251)..(251): location 251 can be a gap or Glu or Leu or Phe
  Misc_feature (252)..(252): location 252 can be Ile or a gap or Lys or Leu
  Misc_feature (253)..(253): location 253 can be a gap or Lys or Arg or Ser
  Misc_feature (254)..(254): location 254 can be a gap or Glu or Ser
  Misc_feature (255)..(255): location 255 can be Ile or a gap or Glu or Ser
  Misc_feature (256)..(256): location 256 can be Ile or a gap or Leu or Arg
  Misc_feature (257)..(257): location 257 can be a gap or Lys or Ser or Gly
  Misc_feature (258)..(258): location 258 can be Ile or a gap or Ser
  Misc_feature (259)..(259): location 259 can be a gap or Asp or Ser or Met or Gly
  Misc_feature (260)..(260): location 260 can be Ile or a gap or His or Gly
  Misc_feature (261)..(261): location 261 can be a gap or Asp or Gln or Ser
  Misc_feature (262)..(262): location 262 can be Ile or a gap or Ala or Phe
  Misc_feature (263)..(263): location 263 can be Asn or a gap or Ser
  Misc_feature (264)..(264): location 264 can be a gap or Asp or Ser or Gly
  Misc_feature (265)..(265): location 265 can be a gap or Asp or Ala or Gly
  Misc_feature (266)..(266): location 266 can be a gap or Pro or Ala or Ser or Thr
  Misc_feature (267)..(267): location 267 can be Ile or a gap or Ala or Pro or Ser or Met
  Misc_feature (268)..(268): location 268 can be a gap or Val or Ala or Ser
  Misc_feature (269)..(269): location 269 can be a gap or Val or Ala or Ser or Gly
  Misc_feature (270)..(270): location 270 can be Val or a gap or Pro or Ala or Ser
  Misc_feature (271)..(271): location 271 can be a gap or Val or Arg or Thr
  Misc_feature (272)..(272): location 272 can be a gap or Glu or Ser or Gly or Thr
  Misc_feature (273)..(273): location 273 can be a gap or Asp or Ser or Gly
  Misc_feature (274)..(274): location 274 can be a gap or Trp or Asp or Gly
  Misc_feature (275)..(275): location 275 can be a gap or Tyr or Cys or Gly
  Misc_feature (276)..(276): location 276 can be a gap or Trp or Gln or Cys
  Misc_feature (277)..(277): location 277 can be a gap or Pro or Phe
  Misc_feature (278)..(278): location 278 can be a gap or Lys or His
  Misc_feature (279)..(279): location 279 can be Asn or a gap or Pro
  Misc_feature (280)..(280): location 280 can be Ile or a gap or Val or Lys or Arg
  Misc_feature (281)..(281): location 281 can be a gap or Lys or Glu or Ser
  Misc_feature (282)..(282): location 282 can be Ile or a gap or Val or Glu or Gln
  Misc_feature (283)..(283): location 283 can be a gap or Tyr or Glu
  Misc_feature (284)..(284): location 284 can be a gap or Tyr or Glu
  Misc_feature (285)..(285): location 285 can be a gap or Lys or Phe
  Misc_feature (286)..(286): location 286 can be a gap or Leu or His
  Misc_feature (287)..(287): location 287 can be Ile or Val or a gap or Arg
  Misc_feature (288)..(288): location 288 can be Asn or a gap or Leu or Gly
  Misc_feature (289)..(289): location 289 can be a gap or Phe or Ser
  Misc_feature (290)..(290): location 290 can be a gap or Asp or Glu or Leu
  Misc_feature (291)..(291): location 291 can be a gap or Ser or Cys
  Misc_feature (292)..(292): location 292 can be Asn or a gap or Ser or Gly
  Misc_feature (293)..(293): location 293 can be a gap or Leu or Ser
  Misc_feature (294)..(294): location 294 can be a gap or Phe or Ser
  Misc_feature (295)..(295): location 295 can be a gap or Asp or Ser
  Misc_feature (296)..(296): location 296 can be a gap or Lys or Glu
  Misc_feature (297)..(297): location 297 can be a gap or Met or Ser or Arg
  Misc_feature (298)..(298): location 298 can be a gap or Arg or Ser
  Misc_feature (299)..(299): location 299 can be a gap or Val or Thr
  Misc_feature (300)..(300): location 300 can be a gap or Lys
  Misc_feature (301)..(301): location 301 can be Ile or a gap or Val
  Misc_feature (302)..(302): location 302 can be a gap or Val
  Misc_feature (303)..(303): location 303 can be a gap or Val or Ala
  Misc_feature (304)..(304): location 304 can be a gap or Ser or Gly
  Misc_feature (305)..(305): location 305 can be Asn or a gap
  Misc_feature (306)..(306): location 306 can be a gap or Thr
  Misc_feature (307)..(307): location 307 can be a gap or Ser or Gly
  Misc_feature (308)..(308): location 308 can be a gap or Ser or Thr
  Misc_feature (309)..(309): location 309 can be a gap or Gly
  Misc_feature (310)..(310): location 310 can be a gap or Val
  Misc_feature (311)..(311): location 311 can be a gap or Tyr
  Misc_feature (312)..(312): location 312 can be a gap or Lys or Arg
  Misc_feature (313)..(313): location 313 can be a gap or Asp
  Misc_feature (314)..(314): location 314 can be a gap or Ala or Gln
  Misc_feature (315)..(315): location 315 can be a gap or Asp or Glu
  Misc_feature (316)..(316): location 316 can be a gap or Leu
  Misc_feature (317)..(317): location 317 can be a gap or Tyr or His
  Misc_feature (318)..(318): location 318 can be a gap or Asp
  Misc_feature (319)..(319): location 319 can be a gap or Lys or Arg
  Misc_feature (320)..(320): location 320 can be a gap or Tyr
  Misc_feature (321)..(321): location 321 can be Ile or a gap
  Misc_feature (322)..(322): location 322 can be Asn or a gap or Asp
  Misc_feature (323)..(323): location 323 can be Ile or a gap or Leu
  Misc_feature (324)..(324): location 324 can be a gap or Ala or Arg or Ser
  Misc_feature (325)..(325): location 325 can be a gap or Ala or Gln or Gly
  Misc_feature (326)..(326): location 326 can be Ile or a gap
  Misc_feature (327)..(327): location 327 can be a gap or Pro or Leu
  Misc_feature (328)..(328): location 328 can be a gap or Glu
  Misc_feature (329)..(329): location 329 can be a gap or Leu
  Misc_feature (330)..(330): location 330 can be Asn or a gap or Ser
  Misc_feature (331)..(331): location 331 can be a gap or Ala or Ser
  Misc_feature (332)..(332): location 332 can be Ile or a gap or Val
  Misc_feature (333)..(333): location 333 can be Asn or Val or a gap or Ser
  Misc_feature (334)..(334): location 334 can be a gap or Lys or Arg
  Misc_feature (335)..(335): location 335 can be a gap or Lys or Asp or Ser
  Misc_feature (336)..(336): location 336 can be a gap or Val or Asp or Ser
  Misc_feature (337)..(337): location 337 can be Asn or a gap or Lys
  Misc_feature (338)..(338): location 338 can be a gap or Gly
  Misc_feature (339)..(339): location 339 can be Ile or a gap or Val
  Misc_feature (340)..(340): location 340 can be a gap or Glu or Gly
  Misc_feature (341)..(341): location 341 can be Ile or a gap
  Misc_feature (342)..(342): location 342 can be a gap or Gly
  Misc_feature (343)..(343): location 343 can be a gap or Ala
  Misc_feature (344)..(344): location 344 can be a gap or Val or Ala
  Misc_feature (345)..(345): location 345 can be a gap or Val or Met or Thr
  Misc_feature (346)..(346): location 346 can be a gap or Ser
  Misc_feature (347)..(347): location 347 can be Ile or a gap
  Misc_feature (348)..(348): location 348 can be a gap or Ser
  Misc_feature (349)..(349): location 349 can be a gap or Gln or Arg
  Misc_feature (350)..(350): location 350 can be a gap or Val or Thr
  Misc_feature (351)..(351): location 351 can be a gap or Ile
  Misc_feature (352)..(352): location 352 can be a gap or Glu
  Misc_feature (353)..(353): location 353 can be a gap or Ile
  Misc_feature (354)..(354): location 354 can be a gap or Leu
  Misc_feature (355)..(355): location 355 can be Asn or a gap or Lys or Gln or Arg
  Misc_feature (356)..(356): location 356 can be a gap or Gln or Ala or Gly
  Misc_feature (357)..(357): location 357 can be Ile or a gap or Glu
  Misc_feature (358)..(358): location 358 can be a gap or Asp or Glu or Ser or Gly
  Misc_feature (359)..(359): location 359 can be Asn or Ile or a gap or Glu
  Misc_feature (360)..(360): location 360 can be a gap or Leu or Ser
  Misc_feature (361)..(361): location 361 can be a gap or Tyr or Arg or Ser or Thr
  Misc_feature (362)..(362): location 362 can be a gap or Lys or Asp or Ser
  Misc_feature (363)..(363): location 363 can be a gap or Asp or Ser or Gly
  Misc_feature (364)..(364): location 364 can be a gap or Pro or Gly
  Misc_feature (365)..(365): location 365 can be a gap or Asn or Gly
  Misc_feature (366)..(366): location 366 can be a gap or Asp or Gly
  Misc_feature (367)..(367): location 367 can be a gap or Ala or Ser
  Misc_feature (368)..(368): location 368 can be a gap or Val or Ala
  Misc_feature (369)..(369): location 369 can be a gap or Val
  Misc_feature (370)..(370): location 370 can be a gap or Phe
  Misc_feature (371)..(371): location 371 can be a gap or Arg or Cys
  Misc_feature (372)..(372): location 372 can be a gap or Lys
  Misc_feature (373)..(373): location 373 can be Ile or a gap or Leu
  Misc_feature (374)..(374): location 374 can be a gap or Ala
  Misc_feature (375)..(375): location 375 can be Tyr or a gap or Asp or Glu
  Misc_feature (376)..(376): location 376 can be a gap or His
  Misc_feature (377)..(377): location 377 can be a gap or Leu or Met
  Misc_feature (378)..(378): location 378 can be a gap or Glu or Ser or Gly
  Misc_feature (379)..(379): location 379 can be a gap or Lys
  Misc_feature (380)..(380): location 380 can be a gap or Val
  Misc_feature (381)..(381): location 381 can be a gap or Ala
  Misc_feature (382)..(382): location 382 can be a gap or Ser
  Misc_feature (383)..(383): location 383 can be a gap or Pro or Gln or Ser
  Misc_feature (384)..(384): location 384 can be a gap or Phe
  Misc_feature (385)..(385): location 385 can be a gap or Val
  Misc_feature (386)..(386): location 386 can be a gap or Gln or Arg
  Misc_feature (387)..(387): location 387 can be Asn or a gap
  Misc_feature (388)..(388): location 388 can be a gap or Met or Thr
  Misc_feature (389)..(389): location 389 can be a gap or Ala
  Misc_feature (390)..(390): location 390 can be a gap or Ala or Ser or Thr
  Misc_feature (391)..(391): location 391 can be Ile or a gap or Leu
  Misc_feature (392)..(392): location 392 can be a gap or Gly
  Misc_feature (393)..(393): location 393 can be a gap or Gly
  Misc_feature (394)..(394): location 394 can be Asn or a gap
  Misc_feature (395)..(395): location 395 can be Ile or a gap or Leu
  Misc_feature (396)..(396): location 396 can be Ile or a gap
  Misc_feature (397)..(397): location 397 can be a gap or Leu or Met
  Misc_feature (398)..(398): location 398 can be a gap or Ala
  Misc_feature (399)..(399): location 399 can be a gap or Gln or His
  Misc_feature (400)..(400): location 400 can be a gap or Lys or Arg
  Misc_feature (401)..(401): location 401 can be Tyr or a gap or Asp or Leu or Met
  Misc_feature (402)..(402): location 402 can be a gap or Glu or Pro or Ser
  Misc_feature (403)..(403): location 403 can be a gap or Phe
  Misc_feature (404)..(404): location 404 can be a gap or Ala or Pro or Ser or Arg
  Misc_feature (405)..(405): location 405 can be a gap or Ser
  Misc_feature (406)..(406): location 406 can be a gap or Asp
  Misc_feature (407)..(407): location 407 can be Ile or a gap
  Misc_feature (408)..(408): location 408 can be a gap or Ala
  Misc_feature (409)..(409): location 409 can be a gap or Thr
  Misc_feature (410)..(410): location 410 can be Ile or a gap or Val
  Misc_feature (411)..(411): location 411 can be a gap or Leu
  Misc_feature (412)..(412): location 412 can be a gap or Leu
  Misc_feature (413)..(413): location 413 can be a gap or Ala or Gly
  Misc_feature (414)..(414): location 414 can be a gap or Ala
  Misc_feature (415)..(415): location 415 can be a gap or Ala or Gly
  Misc_feature (416)..(416): location 416 can be a gap or Ala or Ser
  Misc_feature (417)..(417): location 417 can be a gap or Ser or Thr
  Misc_feature (418)..(418): location 418 can be a gap or Val or Leu
  Misc_feature (419)..(419): location 419 can be Asn or a gap or Cys or Thr
  Misc_feature (420)..(420): location 420 can be Ile or a gap or Leu
  Misc_feature (421)..(421): location 421 can be a gap or Gln
  Misc_feature (422)..(422): location 422 can be a gap or Val or Gln
  Misc_feature (423)..(423): location 423 can be Val or a gap or Ala or Ser
  Misc_feature (424)..(424): location 424 can be a gap or Ala or Ser
  Misc_feature (425)..(425): location 425 can be a gap or Lys or Glu or Ser
  Misc_feature (426)..(426): location 426 can be a gap or Lys or Arg or Thr
  Misc_feature (427)..(427): location 427 can be a gap or Leu or Arg or Met
  Misc_feature (428)..(428): location 428 can be Asn or a gap or His or Met
  Misc_feature (429)..(429): location 429 can be a gap or Val or Cys
  Misc_feature (430)..(430): location 430 can be Ile or a gap or Leu or Thr
  Misc_feature (431)..(431): location 431 can be a gap or Leu or Thr
  Misc_feature (432)..(432): location 432 can be a gap or Glu or Leu
  Misc_feature (433)..(433): location 433 can be a gap or Glu or Gln or Arg
  Misc_feature (434)..(434): location 434 can be a gap or Glu or Phe
  Misc_feature (435)..(435): location 435 can be a gap or Leu or Phe
  Misc_feature (436)..(436): location 436 can be a gap or Asp or Glu or Leu
  Misc_feature (437)..(437): location 437 can be a gap or Lys or Gln or Met
  Misc_feature (438)..(438): location 438 can be a gap or Pro or Ala or Gln
  Misc_feature (439)..(439): location 439 can be a gap or Pro
  Misc_feature (440)..(440): location 440 can be a gap or Leu or Pro or Cys
  Misc_feature (441)..(441): location 441 can be a gap or Asp or Gly or Cys
  Misc_feature (442)..(442): location 442 can be a gap or Asp or His or Cys
  Misc_feature (443)..(443): location 443 can be Asn or a gap or Lys or Ser
  Misc_feature (444)..(444): location 444 can be a gap or Arg or Thr
  Misc_feature (445)..(445): location 445 can be a gap or Leu or Thr
  Misc_feature (446)..(446): location 446 can be a gap or Leu
  Misc_feature (447)..(447): location 447 can be a gap or Leu
  Misc_feature (448)..(448): location 448 can be Ile or a gap or Val or Ser or Arg
  Misc_feature (449)..(449): location 449 can be Ile or a gap or Ser
  Misc_feature (450)..(450): location 450 can be Ile or a gap or Tyr or Phe
  Misc_feature (451)..(451): location 451 can be Ile or a gap or Ser
  Misc_feature (452)..(452): location 452 can be a gap or Pro
  Misc_feature (453)..(453): location 453 can be a gap or His
  Misc_feature (454)..(454): location 454 can be a gap or Trp or Cys
  Misc_feature (455)..(455): location 455 can be a gap or Ala or Thr
  Misc_feature (456)..(456): location 456 can be a gap or Pro or Ser
  Misc_feature (457)..(457): location 457 can be a gap or Ser
  Misc_feature (458)..(458): location 458 can be a gap or Gly
  Misc_feature (459)..(459): location 459 can be a gap or Ile
  Misc_feature (460)..(460): location 460 can be a gap or Ser
  Misc_feature (461)..(461): location 461 can be a gap or Ser
  Misc_feature (462)..(462): location 462 can be a gap or Ser
  Misc_feature (463)..(463): location 463 can be a gap or Ser
  Misc_feature (464)..(464): location 464 can be a gap or Glu
  Misc_feature (465)..(465): location 465 can be a gap or Ser
  Misc_feature (466)..(466): location 466 can be a gap or Val
  Misc_feature (467)..(467): location 467 can be a gap or Asn
  Misc_feature (468)..(468): location 468 can be Ile or a gap or Lys
  Misc_feature (469)..(469): location 469 can be a gap or Pro or Thr
  Misc_feature (470)..(470): location 470 can be a gap or Asp or Gly
  Misc_feature (471)..(471): location 471 can be a gap or Trp or Asp or Cys
  Misc_feature (472)..(472): location 472 can be a gap or Lys or Cys or Gly
  Misc_feature (473)..(473): location 473 can be a gap or Lys or Pro or Ser
  Misc_feature (474)..(474): location 474 can be Tyr or a gap or Asp or Glu or Ala
  Misc_feature (475)..(475): location 475 can be a gap or Asp or His or Ser
  Misc_feature (476)..(476): location 476 can be a gap or Ser or Thr or Gly
  Misc_feature (477)..(477): location 477 can be Ile or a gap or Val or Leu
  Misc_feature (478)..(478): location 478 can be Val or a gap or Leu or Thr
  Misc_feature (479)..(479): location 479 can be a gap or Phe
  Misc_feature (480)..(480): location 480 can be a gap or Glu or Gln
  Misc_feature (481)..(481): location 481 can be a gap or Ser or Thr
  Misc_feature (482)..(482): location 482 can be a gap or Tyr or Phe
  Misc_feature (483)..(483): location 483 can be a gap or Arg
  Misc_feature (484)..(484): location 484 can be a gap or Ala
  Misc_feature (485)..(485): location 485 can be a gap or Ala or Ser
  Misc_feature (486)..(486): location 486 can be a gap or Pro
  Misc_feature (487)..(487): location 487 can be a gap or Arg
  Misc_feature (488)..(488): location 488 can be a gap or Pro
  Misc_feature (489)..(489): location 489 can be Ile or a gap or Leu or Phe
  Misc_feature (490)..(490): location 490 can be a gap or Gly
  Misc_feature (491)..(491): location 491 can be Asn or a gap
  Misc_feature (492)..(492): location 492 can be a gap or Ala
  Misc_feature (493)..(493): location 493 can be a gap or Val
  Misc_feature (494)..(494): location 494 can be a gap or Ser
  Misc_feature (495)..(495): location 495 can be a gap or Tyr
  Misc_feature (496)..(496): location 496 can be a gap or Val or Leu
  Misc_feature (497)..(497): location 497 can be Asn or a gap
  Misc_feature (498)..(498): location 498 can be a gap or Ser
  Misc_feature (499)..(499): location 499 can be a gap or Ala
  Misc_feature (500)..(500): location 500 can be a gap or Phe
  Misc_feature (501)..(501): location 501 can be a gap or Leu
  Misc_feature (502)..(502): location 502 can be a gap or Ala or Gly
  Misc_feature (503)..(503): location 503 can be a gap or Lys or His or Arg
  Misc_feature (504)..(504): location 504 can be Val or a gap or Leu or Ser
  Misc_feature (505)..(505): location 505 can be a gap or Ser
  Misc_feature (506)..(506): location 506 can be a gap or Val or Leu or Ser
  Misc_feature (507)..(507): location 507 can be a gap or Asp
  Misc_feature (508)..(508): location 508 can be a gap or Lys or Glu or Ala or Gly
  Misc_feature (509)..(509): location 509 can be a gap or Ala or Ser or Thr
  Misc_feature (510)..(510): location 510 can be a gap or Ser
  Misc_feature (511)..(511): location 511 can be a gap or Gly
  Misc_feature (512)..(512): location 512 can be Asn or a gap or Asp or Ser
  Misc_feature (513)..(513): location 513 can be Asn or a gap or His or Cys
  Misc_feature (514)..(514): location 514 can be Ile or a gap or Leu
  Misc_feature (515)..(515): location 515 can be Ile or a gap or Leu
  Misc_feature (516)..(516): location 516 can be a gap or Glu or Ser
  Misc_feature (517)..(517): location 517 can be Asn or a gap or Lys or Asp
  Misc_feature (518)..(518): location 518 can be a gap or Val or Leu
  Misc_feature (519)..(519): location 519 can be a gap or Arg or His or Cys
  Misc_feature (520)..(520): location 520 can be a gap or Leu
  Misc_feature (521)..(521): location 521 can be a gap or Ala
  Misc_feature (522)..(522): location 522 can be a gap or Phe
  Misc_feature (523)..(523): location 523 can be a gap or Gly
  Misc_feature (524)..(524): location 524 can be a gap or Pro or Ala
  Misc_feature (525)..(525): location 525 can be a gap or Tyr or Phe
  Misc_feature (526)..(526): location 526 can be a gap or Gly
  Misc_feature (527)..(527): location 527 can be a gap or Ala or Ser or Thr
  Misc_feature (528)..(528): location 528 can be a gap or Lys or Glu or Gln
  Misc_feature (529)..(529): location 529 can be a gap or His
  Misc_feature (530)..(530): location 530 can be a gap or Ala
  Misc_feature (531)..(531): location 531 can be Ile or a gap or Val
  Misc_feature (532)..(532): location 532 can be a gap or Arg
  Misc_feature (533)..(533): location 533 can be a gap or Ala
  Misc_feature (534)..(534): location 534 can be a gap or Ser or Arg or Thr
  Misc_feature (535)..(535): location 535 can be Asn or a gap or Lys or Glu
  Misc_feature (536)..(536): location 536 can be a gap or Val
  Misc_feature (537)..(537): location 537 can be a gap or Glu
  Misc_feature (538)..(538): location 538 can be a gap or Lys or Glu or Ser
  Misc_feature (539)..(539): location 539 can be Tyr or a gap or Leu or Phe
  Misc_feature (540)..(540): location 540 can be a gap or Leu
  Misc_feature (541)..(541): location 541 can be a gap or Val or Lys or Thr
  Misc_feature (542)..(542): location 542 can be a gap or Gly
  Misc_feature (543)..(543): location 543 can be a gap or Lys
  Misc_feature (544)..(544): location 544 can be Ile or a gap or Pro or Leu
  Misc_feature (545)..(545): location 545 can be Ile or a gap or Val or Leu
  Misc_feature (546)..(546): location 546 can be a gap or Ser or Thr
  Misc_feature (547)..(547): location 547 can be a gap or Ala
  Misc_feature (548)..(548): location 548 can be a gap or Pro or Ser
  Misc_feature (549)..(549): location 549 can be a gap or Val or Leu
  Misc_feature (550)..(550): location 550 can be Ile or Val or a gap or Leu
  Misc_feature (551)..(551): location 551 can be a gap or Leu
  Misc_feature (552)..(552): location 552 can be a gap or Glu
  Misc_feature (553)..(553): location 553 can be a gap or Ala
  Misc_feature (554)..(554): location 554 can be Ile or a gap or Val or Cys
  Misc_feature (555)..(555): location 555 can be a gap or Arg or Thr
  Misc_feature (556)..(556): location 556 can be a gap or Val or Leu
  Misc_feature (557)..(557): location 557 can be a gap or Leu
  Misc_feature (558)..(558): location 558 can be a gap or Lys or Arg
  Misc_feature (559)..(559): location 559 can be a gap or Lys or Glu or Gly
  Misc_feature (560)..(560): location 560 can be a gap or Val or Thr
  Misc_feature (561)..(561): location 561 can be Ile or a gap or Val
  Misc_feature (562)..(562): location 562 can be a gap or Val or Ser
  Misc_feature (563)..(563): location 563 can be a gap or Pro
  Misc_feature (564)..(564): location 564 can be Val or a gap or Ala or Gly
  Misc_feature (565)..(565): location 565 can be a gap or Glu
  Misc_feature (566)..(566): location 566 can be a gap or Gly
  Misc_feature (567)..(567): location 567 can be a gap or Thr
  Misc_feature (568)..(568): location 568 can be a gap or Arg or Thr
  Misc_feature (569)..(569): location 569 can be a gap or His
  Misc_feature (570)..(570): location 570 can be a gap or Ala or Pro
  Misc_feature (571)..(571): location 571 can be a gap or Glu or Ala
  Misc_feature (572)..(572): location 572 can be a gap or Tyr
  Misc_feature (573)..(573): location 573 can be a gap or Arg
  Misc_feature (574)..(574): location 574 can be a gap or Val or Ser
  Misc_feature (575)..(575): location 575 can be a gap or Ser
  Misc_feature (576)..(576): location 576 can be Val or a gap or Leu
  Misc_feature (577)..(577): location 577 can be a gap or Ala
  Misc_feature (578)..(578): location 578 can be a gap or Val
  Misc_feature (579)..(579): location 579 can be a gap or Ala or Ser or Gly
  Misc_feature (580)..(580): location 580 can be a gap or Tyr or Phe
  Misc_feature (581)..(581): location 581 can be a gap or Leu
  Misc_feature (582)..(582): location 582 can be a gap or Phe
  Misc_feature (583)..(583): location 583 can be a gap or Lys or Ser or Arg
  Misc_feature (584)..(584): location 584 can be a gap or Phe
  Misc_feature (585)..(585): location 585 can be a gap or Leu
  Misc_feature (586)..(586): location 586 can be a gap or Tyr or Ser or Thr
  Misc_feature (587)..(587): location 587 can be a gap or Pro or Ser
  Misc_feature (588)..(588): location 588 can be Ile or a gap or Leu
  Misc_feature (589)..(589): location 589 can be a gap or Ala or Cys or Thr
  Misc_feature (590)..(590): location 590 can be Asn or a gap or Lys
  Misc_feature (591)..(591): location 591 can be a gap or Gly
  Misc_feature (592)..(592): location 592 can be a gap or Val or Thr
  Misc_feature (593)..(593): location 593 can be a gap or Ile or Phe
  Misc_feature (594)..(594): location 594 can be a gap or Lys or Glu
  Misc_feature (595)..(595): location 595 can be a gap or Pro
  Misc_feature (596)..(596): location 596 can be a gap or Val or Gly
  Misc_feature (597)..(597): location 597 can be a gap or Lys or Glu
  Misc_feature (598)..(598): location 598 can be a gap or Ala or Thr
  Misc_feature (599)..(599): location 599 can be a gap or Val or Leu
  Misc_feature (600)..(600): location 600 can be a gap or Ser or His
  Misc_feature (601)..(601): location 601 can be a gap or Ile or Leu
  Misc_feature (602)..(602): location 602 can be a gap or Asn or Ser
  Misc_feature (603)..(603): location 603 can be a gap or Glu or Gly
  Misc_feature (604)..(604): location 604 can be a gap or Asp or Leu or His
  Misc_feature (605)..(605): location 605 can be Ile or a gap or Asp or Leu
  Misc_feature (606)..(606): location 606 can be Ile or Val or a gap or Asp or Glu
  Misc_feature (607)..(607): location 607 can be a gap or Lys or Pro or His or Ser
  Misc_feature (608)..(608): location 608 can be a gap or Asp or Glu or Pro or Thr
  Misc_feature (609)..(609): location 609 can be Asn or a gap or Asp or Glu
  Misc_feature (610)..(610): location 610 can be Asn or a gap or Ala
  Misc_feature (611)..(611): location 611 can be Asn or Val or a gap or Gly
  Misc_feature (612)..(612): location 612 can be Asn or a gap or Val or His
  Misc_feature (613)..(613): location 613 can be Asn or a gap or Pro or Met
  Misc_feature (614)..(614): location 614 can be Asn or a gap or Ala
  Misc_feature (615)..(615): location 615 can be Asn or a gap or Arg or Gly
  Misc_feature (616)..(616): location 616 can be Asn or a gap or Ser or Gly
  Misc_feature (617)..(617): location 617 can be Val or a gap or Pro or Phe or Cys
  Misc_feature (618)..(618): location 618 can be a gap or Asp or Pro or Thr
  Misc_feature (619)..(619): location 619 can be Asn or a gap or Thr
  Misc_feature (620)..(620): location 620 can be a gap or His or Gly
  Misc_feature (621)..(621): location 621 can be a gap or Val or Ser or Thr
  Misc_feature (622)..(622): location 622 can be a gap or Asp or Ala or Cys
  Misc_feature (623)..(623): location 623 can be Asn or a gap or Val or Thr
  Misc_feature (624)..(624): location 624 can be a gap or Ser or Thr or Gly
  Misc_feature (625)..(625): location 625 can be Ile or Asn or a gap or Pro or Ser
  Misc_feature (626)..(626): location 626 can be Val or a gap or Lys or Ala or Gly
  Misc_feature (627)..(627): location 627 can be Asn or a gap or Asp or Glu or Thr
  Misc_feature (628)..(628): location 628 can be Ile or a gap or Ser or Thr
  Misc_feature (629)..(629): location 629 can be Asn or a gap or Ser
  Misc_feature (630)..(630): location 630 can be Asn or a gap or Pro or Gly
  Misc_feature (631)..(631): location 631 can be a gap or Val or Glu or Ser
  Misc_feature (632)..(632): location 632 can be a gap or Lys or Ala
  Misc_feature (633)..(633): location 633 can be a gap or Glu or Ser or His
  Misc_feature (634)..(634): location 634 can be a gap or Asp or Ser
  Misc_feature (635)..(635): location 635 can be Asn or a gap or Leu or Thr
  Misc_feature (636)..(636): location 636 can be a gap or Val or His
  Misc_feature (637)..(637): location 637 can be a gap or Asp or Gly
  Misc_feature (638)..(638): location 638 can be Asn or a gap or Ser
  Misc_feature (639)..(639): location 639 can be a gap or Asp or Phe or Ser
  Misc_feature (640)..(640): location 640 can be Tyr or a gap or Asp or Arg
  Misc_feature (641)..(641): location 641 can be Ile or a gap or Leu or Met
  Misc_feature (642)..(642): location 642 can be a gap or Leu or Pro
  Misc_feature (643)..(643): location 643 can be Ile or a gap or Glu or Leu
  Misc_feature (644)..(644): location 644 can be a gap or Lys or Ser
  Misc_feature (645)..(645): location 645 can be a gap or Ser
  Misc_feature (646)..(646): location 646 can be a gap or Lys or Arg
  Misc_feature (647)..(647): location 647 can be a gap or Gln or Arg
  Misc_feature (648)..(648): location 648 can be a gap or Val or Glu
  Misc_feature (649)..(649): location 649 can be Ile or a gap or Met or Thr
  Misc_feature (650)..(650): location 650 can be a gap or Val or Glu or Leu
  Misc_feature (651)..(651): location 651 can be Ile or a gap or Phe or Ser
  Misc_feature (652)..(652): location 652 can be a gap or Ser or Gly
  Misc_feature (653)..(653): location 653 can be a gap or Asp or Glu
  Misc_feature (654)..(654): location 654 can be a gap or Asp or Glu
  Misc_feature (655)..(655): location 655 can be a gap or Tyr
  Misc_feature (656)..(656): location 656 can be a gap or Lys or Leu or Arg
  Misc_feature (657)..(657): location 657 can be a gap or Pro
  Misc_feature (658)..(658): location 658 can be Ile or a gap or Val
  Misc_feature (659)..(659): location 659 can be a gap or Gly
  Misc_feature (660)..(660): location 660 can be a gap or Asp or Lys or Leu
  Misc_feature (661)..(661): location 661 can be a gap or Pro
  Misc_feature (662)..(662): location 662 can be Ile or a gap or Ala
  Misc_feature (663)..(663): location 663 can be a gap or Lys or Glu
  Misc_feature (664)..(664): location 664 can be a gap or Lys
  Misc_feature (665)..(665): location 665 can be Tyr or a gap or Val or Thr
  Misc_feature (666)..(666): location 666 can be a gap or Lys or Gly
  Misc_feature (667)..(667): location 667 can be Val or a gap or Ala
  Misc_feature (668)..(668): location 668 can be a gap or Glu
  Misc_feature (669)..(669): location 669 can be a gap or Leu
  Misc_feature (670)..(670): location 670 can be a gap or Gln
  Misc_feature (671)..(671): location 671 can be a gap or Ala
  Misc_feature (672)..(672): location 672 can be a gap or Ser
  Misc_feature (673)..(673): location 673 can be a gap or Gly
  Misc_feature (674)..(674): location 674 can be a gap or Glu
  Misc_feature (675)..(675): location 675 can be a gap or Ala
  Misc_feature (676)..(676): location 676 can be Ile or a gap or Val
  Misc_feature (677)..(677): location 677 can be a gap or Tyr
  Misc_feature (678)..(678): location 678 can be a gap or Val
  Misc_feature (679)..(679): location 679 can be a gap or Asp
  Misc_feature (680)..(680): location 680 can be a gap or Asp
  Misc_feature (681)..(681): location 681 can be Ile or a gap
  Misc_feature (682)..(682): location 682 can be a gap or Pro or Ser
  Misc_feature (683)..(683): location 683 can be a gap or Ala or Ser
  Misc_feature (684)..(684): location 684 can be a gap or Pro
  Misc_feature (685)..(685): location 685 can be a gap or Lys
  Misc_feature (686)..(686): location 686 can be Asn or a gap or Asp
  Misc_feature (687)..(687): location 687 can be a gap or Cys
  Misc_feature (688)..(688): location 688 can be a gap or Leu
  Misc_feature (689)..(689): location 689 can be a gap or Tyr or His
  Misc_feature (690)..(690): location 690 can be a gap or Gly
  Misc_feature (691)..(691): location 691 can be a gap or Glu or Ala
  Misc_feature (692)..(692): location 692 can be a gap or Phe
  Misc_feature (693)..(693): location 693 can be Ile or a gap or Val
  Misc_feature (694)..(694): location 694 can be a gap or Tyr
  Misc_feature (695)..(695): location 695 can be a gap or Ser
  Misc_feature (696)..(696): location 696 can be a gap or Thr
  Misc_feature (697)..(697): location 697 can be a gap or Lys or Gln or His
  Misc_feature (698)..(698): location 698 can be a gap or Pro
  Misc_feature (699)..(699): location 699 can be a gap or Leu or His
  Misc_feature (700)..(700): location 700 can be a gap or Ala
  Misc_feature (701)..(701): location 701 can be Asn or a gap or His
  Misc_feature (702)..(702): location 702 can be Ile or a gap or Val
  Misc_feature (703)..(703): location 703 can be a gap or Lys
  Misc_feature (704)..(704): location 704 can be a gap or Asp or Ser or Gly
  Misc_feature (705)..(705): location 705 can be Ile or Val or a gap
  Misc_feature (706)..(706): location 706 can be Asn or a gap or Lys or Glu
  Misc_feature (707)..(707): location 707 can be a gap or Leu or Phe
  Misc_feature (708)..(708): location 708 can be Asn or a gap or Lys or Arg
  Misc_feature (709)..(709): location 709 can be a gap or Pro or Ser
  Misc_feature (710)..(710): location 710 can be a gap or Ser
  Misc_feature (711)..(711): location 711 can be a gap or Leu
  Misc_feature (712)..(712): location 712 can be a gap or Glu or Ala
  Misc_feature (713)..(713): location 713 can be a gap or Gln or Ser
  Misc_feature (714)..(714): location 714 can be a gap or Lys or Leu or Gln
  Misc_feature (715)..(715): location 715 can be a gap or Lys
  Misc_feature (716)..(716): location 716 can be Ile or a gap or Val or Thr
  Misc_feature (717)..(717): location 717 can be Ile or a gap or Val or Leu
  Misc_feature (718)..(718): location 718 can be a gap or Ala or Thr
  Misc_feature (719)..(719): location 719 can be Ile or a gap or Val
  Misc_feature (720)..(720): location 720 can be Ile or a gap or Val
  Misc_feature (721)..(721): location 721 can be a gap or Ser or Thr
  Misc_feature (722)..(722): location 722 can be a gap or Leu or Ala
  Misc_feature (723)..(723): location 723 can be a gap or Lys
  Misc_feature (724)..(724): location 724 can be a gap or Asp
  Misc_feature (725)..(725): location 725 can be Ile or a gap
  Misc_feature (726)..(726): location 726 can be a gap or Pro
  Misc_feature (727)..(727): location 727 can be a gap or Lys or Thr
  Misc_feature (728)..(728): location 728 can be Asn or a gap or Gly
  Misc_feature (729)..(729): location 729 can be a gap or Gly
  Misc_feature (730)..(730): location 730 can be a gap or Lys or Glu or Arg or Ser
  Misc_feature (731)..(731): location 731 can be Asn or a gap
  Misc_feature (732)..(732): location 732 can be Ile or a gap or Val
  Misc_feature (733)..(733): location 733 can be a gap or Gly
  Misc_feature (734)..(734): location 734 can be a gap or Ala or Ser
  Misc_feature (735)..(735): location 735 can be Asn or a gap or Thr or Cys
  Misc_feature (736)..(736): location 736 can be a gap or Phe or Ser or Thr
  Misc_feature (737)..(737): location 737 can be Ile or a gap or Leu or Pro
  Misc_feature (738)..(738): location 738 can be a gap or Phe or Met
  Misc_feature (739)..(739): location 739 can be a gap or Leu or Gly
  Misc_feature (740)..(740): location 740 can be a gap or Asp or Pro or Gly
  Misc_feature (741)..(741): location 741 can be a gap or Asp or Glu
  Misc_feature (742)..(742): location 742 can be a gap or Glu
  Misc_feature (743)..(743): location 743 can be a gap or Pro or Ala
  Misc_feature (744)..(744): location 744 can be a gap or Leu
  Misc_feature (745)..(745): location 745 can be a gap or Phe
  Misc_feature (746)..(746): location 746 can be a gap or Val or Ala or Gly
  Misc_feature (747)..(747): location 747 can be a gap or Asp or His
  Misc_feature (748)..(748): location 748 can be a gap or Pro
  Misc_feature (749)..(749): location 749 can be Ile or a gap or Val or Leu
  Misc_feature (750)..(750): location 750 can be a gap or Ala or Ser or Thr
  Misc_feature (751)..(751): location 751 can be a gap or Glu or Gln
  Misc_feature (752)..(752): location 752 can be a gap or Trp or Phe
  Misc_feature (753)..(753): location 753 can be a gap or Ala
  Misc_feature (754)..(754): location 754 can be a gap or Gly
  Misc_feature (755)..(755): location 755 can be a gap or Glu or Gln
  Misc_feature (756)..(756): location 756 can be Asn or a gap or Ala or Pro
  Misc_feature (757)..(757): location 757 can be Ile or a gap or Leu
  Misc_feature (758)..(758): location 758 can be a gap or Gly
  Misc_feature (759)..(759): location 759 can be Ile or a gap or Val
  Misc_feature (760)..(760): location 760 can be a gap or Val
  Misc_feature (761)..(761): location 761 can be Ile or a gap or Val
  Misc_feature (762)..(762): location 762 can be a gap or Ala
  Misc_feature (763)..(763): location 763 can be a gap or Glu
  Misc_feature (764)..(764): location 764 can be a gap or Thr
  Misc_feature (765)..(765): location 765 can be a gap or Gln
  Misc_feature (766)..(766): location 766 can be a gap or Lys or Arg
  Misc_feature (767)..(767): location 767 can be a gap or Tyr or Thr
  Misc_feature (768)..(768): location 768 can be a gap or Ala
  Misc_feature (769)..(769): location 769 can be Asn or a gap or Tyr or Asp
  Misc_feature (770)..(770): location 770 can be Ile or a gap or Met
  Misc_feature (771)..(771): location 771 can be a gap or Ala
  Misc_feature (772)..(772): location 772 can be a gap or Ala
  Misc_feature (773)..(773): location 773 can be a gap or Lys or Arg or Ser
  Misc_feature (774)..(774): location 774 can be a gap or Gln or Arg
  Misc_feature (775)..(775): location 775 can be a gap or Ala or Ser
  Misc_feature (776)..(776): location 776 can be a gap or Val or Leu
  Misc_feature (777)..(777): location 777 can be Ile or a gap or Val
  Misc_feature (778)..(778): location 778 can be a gap or Asp or Glu
  Misc_feature (779)..(779): location 779 can be a gap or Tyr
  Misc_feature (780)..(780): location 780 can be Asn or a gap or Ser or Thr
  Misc_feature (781)..(781): location 781 can be a gap or Met or Thr
  Misc_feature (782)..(782): location 782 can be a gap or Asp or Glu
  Misc_feature (783)..(783): location 783 can be Asn or a gap or Gly
  Misc_feature (784)..(784): location 784 can be a gap or Leu
  Misc_feature (785)..(785): location 785 can be a gap or Lys or Asp or Gln
  Misc_feature (786)..(786): location 786 can be a gap or Ala or Pro
  Misc_feature (787)..(787): location 787 can be a gap or Pro
  Misc_feature (788)..(788): location 788 can be Ile or a gap
  Misc_feature (789)..(789): location 789 can be a gap or Leu
  Misc_feature (790)..(790): location 790 can be a gap or Ser or Thr
  Misc_feature (791)..(791): location 791 can be Ile or Val or a gap
  Misc_feature (792)..(792): location 792 can be a gap or Glu
  Misc_feature (793)..(793): location 793 can be a gap or Asp or Glu or Gln
  Misc_feature (794)..(794): location 794 can be a gap or Ala
  Misc_feature (795)..(795): location 795 can be a gap or Val
  Misc_feature (796)..(796): location 796 can be a gap or Gln or Arg
  Misc_feature (797)..(797): location 797 can be Asn or a gap or Ser or His
  Misc_feature (798)..(798): location 798 can be Asn or a gap or Ser
  Misc_feature (799)..(799): location 799 can be a gap or Ser
  Misc_feature (800)..(800): location 800 can be a gap or Tyr
  Misc_feature (801)..(801): location 801 can be a gap or Phe
  Misc_feature (802)..(802): location 802 can be a gap or Glu or Gln or Pro
  Misc_feature (803)..(803): location 803 can be Ile or a gap or Val
  Misc_feature (804)..(804): location 804 can be a gap or Leu or Pro
  Misc_feature (805)..(805): location 805 can be a gap or Pro
  Misc_feature (806)..(806): location 806 can be a gap or Glu or Phe
  Misc_feature (807)..(807): location 807 can be a gap or Leu or Arg
  Misc_feature (808)..(808): location 808 can be a gap or Gln or Leu or Ala
  Misc_feature (809)..(809): location 809 can be a gap or Pro
  Misc_feature (810)..(810): location 810 can be a gap or Lys or Gln or Thr
  Misc_feature (811)..(811): location 811 can be a gap or Lys or Gln or Pro
  Misc_feature (812)..(812): location 812 can be Ile or Val or a gap
  Misc_feature (813)..(813): location 813 can be a gap or Gly
  Misc_feature (814)..(814): location 814 can be a gap or Asp or Glu
  Misc_feature (815)..(815): location 815 can be a gap or Phe
  Misc_feature (816)..(816): location 816 can be Asn or a gap or Ser
  Misc_feature (817)..(817): location 817 can be a gap or Lys or Gln
  Misc_feature (818)..(818): location 818 can be a gap or Ala or Gly
  Misc_feature (819)..(819): location 819 can be a gap or Met
  Misc_feature (820)..(820): location 820 can be a gap or Glu or Ala or Ser
  Misc_feature (821)..(821): location 821 can be a gap or Glu
  Misc_feature (822)..(822): location 822 can be a gap or Ala
  Misc_feature (823)..(823): location 823 can be a gap or Asp
  Misc_feature (824)..(824): location 824 can be a gap or Gln or His
  Misc_feature (825)..(825): location 825 can be a gap or Lys
  Misc_feature (826)..(826): location 826 can be Ile or a gap
  Misc_feature (827)..(827): location 827 can be Ile or a gap or Tyr or Met
  Misc_feature (828)..(828): location 828 can be a gap or Asp or Ser
  Misc_feature (829)..(829): location 829 can be a gap or Glu or Thr or Gly
  Misc_feature (830)..(830): location 830 can be a gap or Glu
  Misc_feature (831)..(831): location 831 can be a gap or Val
  Misc_feature (832)..(832): location 832 can be Asn or a gap or Lys
  Misc_feature (833)..(833): location 833 can be a gap or Leu
  Misc_feature (834)..(834): location 834 can be a gap or Glu or Ala or His or Gly
  Misc_feature (835)..(835): location 835 can be a gap or Ser
  Misc_feature (836)..(836): location 836 can be a gap or Gln
  Misc_feature (837)..(837): location 837 can be a gap or Tyr
  Misc_feature (838)..(838): location 838 can be a gap or Tyr
  Misc_feature (839)..(839): location 839 can be a gap or Phe
  Misc_feature (840)..(840): location 840 can be a gap or Tyr
  Misc_feature (841)..(841): location 841 can be a gap or Met
  Misc_feature (842)..(842): location 842 can be a gap or Glu
  Misc_feature (843)..(843): location 843 can be a gap or Thr
  Misc_feature (844)..(844): location 844 can be a gap or Gln
  Misc_feature (845)..(845): location 845 can be a gap or Thr
  Misc_feature (846)..(846): location 846 can be a gap or Ala
  Misc_feature (847)..(847): location 847 can be a gap or Leu
  Misc_feature (848)..(848): location 848 can be a gap or Ala
  Misc_feature (849)..(849): location 849 can be Ile or a gap or Phe
  Misc_feature (850)..(850): location 850 can be a gap or Pro
  Misc_feature (851)..(851): location 851 can be a gap or Asp or Glu
  Misc_feature (852)..(852): location 852 can be a gap or Glu
  Misc_feature (853)..(853): location 853 can be a gap or Asp
  Misc_feature (854)..(854): location 854 can be Asn or a gap
  Misc_feature (855)..(855): location 855 can be a gap or Thr or Cys
  Misc_feature (856)..(856): location 856 can be Ile or a gap or Met
  Misc_feature (857)..(857): location 857 can be a gap or Val or Thr
  Misc_feature (858)..(858): location 858 can be a gap or Val or Leu
  Misc_feature (859)..(859): location 859 can be a gap or Tyr
  Misc_feature (860)..(860): location 860 can be a gap or Val or Ser or Cys
  Misc_feature (861)..(861): location 861 can be a gap or Ser
  Misc_feature (862)..(862): location 862 can be a gap or Ala or Ser
  Misc_feature (863)..(863): location 863 can be a gap or Gln
  Misc_feature (864)..(864): location 864 can be a gap or Leu or Phe or Met or Cys
  Misc_feature (865)..(865): location 865 can be a gap or Pro
  Misc_feature (866)..(866): location 866 can be a gap or Glu
  Misc_feature (867)..(867): location 867 can be Ile or a gap or Val or Leu
  Misc_feature (868)..(868): location 868 can be a gap or Ala or Thr
  Misc_feature (869)..(869): location 869 can be a gap or Gln
  Misc_feature (870)..(870): location 870 can be Asn or a gap or Asp or Glu
  Misc_feature (871)..(871): location 871 can be Ile or Val or a gap or Thr
  Misc_feature (872)..(872): location 872 can be Ile or a gap or Val
  Misc_feature (873)..(873): location 873 can be a gap or Ala or Ser
  Misc_feature (874)..(874): location 874 can be a gap or Lys or Arg
  Misc_feature (875)..(875): location 875 can be a gap or Cys
  Misc_feature (876)..(876): location 876 can be a gap or Leu
  Misc_feature (877)..(877): location 877 can be a gap or Gly
  Misc_feature (878)..(878): location 878 can be Ile or Val or a gap or Leu
  Misc_feature (879)..(879): location 879 can be a gap or Pro
  Misc_feature (880)..(880): location 880 can be a gap or Tyr or Phe or Cys
  Misc_feature (881)..(881): location 881 can be Asn or a gap or His
  Misc_feature (882)..(882): location 882 can be Asn or a gap
  Misc_feature (883)..(883): location 883 can be a gap or Val
  Misc_feature (884)..(884): location 884 can be a gap or Arg
  Misc_feature (885)..(885): location 885 can be Ile or a gap or Val
  Misc_feature (886)..(886): location 886 can be Ile or a gap
  Misc_feature (887)..(887): location 887 can be a gap or Thr
  Misc_feature (888)..(888): location 888 can be a gap or Arg
  Misc_feature (889)..(889): location 889 can be a gap or Arg
  Misc_feature (890)..(890): location 890 can be a gap or Val or Ala
  Misc_feature (891)..(891): location 891 can be a gap or Gly
  Misc_feature (892)..(892): location 892 can be a gap or Gly
  Misc_feature (893)..(893): location 893 can be a gap or Gly
  Misc_feature (894)..(894): location 894 can be a gap or Phe
  Misc_feature (895)..(895): location 895 can be a gap or Gly
  Misc_feature (896)..(896): location 896 can be a gap or Gly
  Misc_feature (897)..(897): location 897 can be a gap or Lys
  Misc_feature (898)..(898): location 898 can be a gap or Ala
  Misc_feature (899)..(899): location 899 can be a gap or Val or Met
  Misc_feature (900)..(900): location 900 can be a gap or Lys or Arg
  Misc_feature (901)..(901): location 901 can be a gap or Ala or Ser
  Misc_feature (902)..(902): location 902 can be Ile or a gap or Leu or Thr
  Misc_feature (903)..(903): location 903 can be a gap or Pro or His
  Misc_feature (904)..(904): location 904 can be Ile or a gap or Val
  Misc_feature (905)..(905): location 905 can be a gap or Ala
  Misc_feature (906)..(906): location 906 can be a gap or Ala or Thr
  Misc_feature (907)..(907): location 907 can be a gap or Ala
  Misc_feature (908)..(908): location 908 can be a gap or Ala or Cys
  Misc_feature (909)..(909): location 909 can be a gap or Ala
  Misc_feature (910)..(910): location 910 can be a gap or Val or Leu
  Misc_feature (911)..(911): location 911 can be a gap or Ala or Ser or Cys
  Misc_feature (912)..(912): location 912 can be a gap or Ala
  Misc_feature (913)..(913): location 913 can be a gap or Phe or His
  Misc_feature (914)..(914): location 914 can be a gap or Lys or Thr
  Misc_feature (915)..(915): location 915 can be a gap or Leu
  Misc_feature (916)..(916): location 916 can be a gap or Gln or Arg
  Misc_feature (917)..(917): location 917 can be a gap or Arg
  Misc_feature (918)..(918): location 918 can be a gap or Pro
  Misc_feature (919)..(919): location 919 can be a gap or Val
  Misc_feature (920)..(920): location 920 can be a gap or Arg
  Misc_feature (921)..(921): location 921 can be Ile or a gap or Met
  Misc_feature (922)..(922): location 922 can be a gap or Tyr
  Misc_feature (923)..(923): location 923 can be a gap or Leu
  Misc_feature (924)..(924): location 924 can be Asn or a gap or Asp
  Misc_feature (925)..(925): location 925 can be a gap or Arg
  Misc_feature (926)..(926): location 926 can be Asn or a gap or Lys
  Misc_feature (927)..(927): location 927 can be a gap or Thr
  Misc_feature (928)..(928): location 928 can be a gap or Asp
  Misc_feature (929)..(929): location 929 can be a gap or Met
  Misc_feature (930)..(930): location 930 can be Ile or a gap
  Misc_feature (931)..(931): location 931 can be a gap or Met
  Misc_feature (932)..(932): location 932 can be Val or a gap or Ala or Thr
  Misc_feature (933)..(933): location 933 can be a gap or Gly
  Misc_feature (934)..(934): location 934 can be a gap or Gly
  Misc_feature (935)..(935): location 935 can be a gap or Arg
  Misc_feature (936)..(936): location 936 can be a gap or His
  Misc_feature (937)..(937): location 937 can be a gap or Pro
  Misc_feature (938)..(938): location 938 can be a gap or Met
  Misc_feature (939)..(939): location 939 can be a gap or Lys
  Misc_feature (940)..(940): location 940 can be Ile or a gap or Val or Ala
  Misc_feature (941)..(941): location 941 can be a gap or Lys or Arg
  Misc_feature (942)..(942): location 942 can be a gap or Tyr
  Misc_feature (943)..(943): location 943 can be a gap or Ser
  Misc_feature (944)..(944): location 944 can be a gap or Val
  Misc_feature (945)..(945): location 945 can be a gap or Gly
  Misc_feature (946)..(946): location 946 can be a gap or Phe
  Misc_feature (947)..(947): location 947 can be a gap or Lys
  Misc_feature (948)..(948): location 948 can be a gap or Ser
  Misc_feature (949)..(949): location 949 can be a gap or Asp
  Misc_feature (950)..(950): location 950 can be a gap or Gly
  Misc_feature (951)..(951): location 951 can be Asn or a gap or Lys
  Misc_feature (952)..(952): location 952 can be Ile or a gap
  Misc_feature (953)..(953): location 953 can be a gap or Thr
  Misc_feature (954)..(954): location 954 can be a gap or Ala or Gly
  Misc_feature (955)..(955): location 955 can be a gap or Leu
  Misc_feature (956)..(956): location 956 can be a gap or His
  Misc_feature (957)..(957): location 957 can be Ile or Val or a gap or Leu or Phe
  Misc_feature (958)..(958): location 958 can be a gap or Asp or Glu
  Misc_feature (959)..(959): location 959 can be a gap or Leu
  Misc_feature (960)..(960): location 960 can be a gap or Lys or Leu or Arg or Gly
  Misc_feature (961)..(961): location 961 can be Ile or a gap or Val or Met
  Misc_feature (962)..(962): location 962 can be Asn or a gap
  Misc_feature (963)..(963): location 963 can be a gap or Ala or Cys or Gly
  Misc_feature (964)..(964): location 964 can be a gap or Gly
  Misc_feature (965)..(965): location 965 can be Ile or a gap
  Misc_feature (966)..(966): location 966 can be a gap or Ser or Thr
  Misc_feature (967)..(967): location 967 can be a gap or Ala or Gln or Pro
  Misc_feature (968)..(968): location 968 can be a gap or Asp or Glu
  Misc_feature (969)..(969): location 969 can be a gap or Val or Ala or Phe or Cys
  Misc_feature (970)..(970): location 970 can be a gap or Ser
  Misc_feature (971)..(971): location 971 can be a gap or Pro
  Misc_feature (972)..(972): location 972 can be a gap or Val or Ala
  Misc_feature (973)..(973): location 973 can be Ile or a gap or Leu
  Misc_feature (974)..(974): location 974 can be a gap or Pro
  Misc_feature (975)..(975): location 975 can be Tyr or a gap or Val or His or Gly
  Misc_feature (976)..(976): location 976 can be Asn or a gap or Ala or Thr
  Misc_feature (977)..(977): location 977 can be Ile or a gap or Phe
  Misc_feature (978)..(978): location 978 can be Ile or a gap or Val
  Misc_feature (979)..(979): location 979 can be a gap or Glu or Ser or Gly
  Misc_feature (980)..(980): location 980 can be a gap or Ala or Gly
  Misc_feature (981)..(981): location 981 can be a gap or Leu
  Misc_feature (982)..(982): location 982 can be a gap or Lys
  Misc_feature (983)..(983): location 983 can be a gap or Lys
  Misc_feature (984)..(984): location 984 can be a gap or Tyr
  Misc_feature (985)..(985): location 985 can be Asn or a gap or Ser
  Misc_feature (986)..(986): location 986 can be a gap or Trp
  Misc_feature (987)..(987): location 987 can be a gap or Gly
  Misc_feature (988)..(988): location 988 can be a gap or Ala
  Misc_feature (989)..(989): location 989 can be a gap or Leu or Phe
  Misc_feature (990)..(990): location 990 can be a gap or Ala or Ser
  Misc_feature (991)..(991): location 991 can be a gap or Tyr or Phe
  Misc_feature (992)..(992): location 992 can be a gap or Asp
  Misc_feature (993)..(993): location 993 can be Ile or Val or a gap or Ala
  Misc_feature (994)..(994): location 994 can be a gap or Lys or Arg
  Misc_feature (995)..(995): location 995 can be Ile or a gap or Val or Leu
  Misc_feature (996)..(996): location 996 can be a gap or Thr or Cys
  Misc_feature (997)..(997): location 997 can be Ile or a gap or Lys
  Misc_feature (998)..(998): location 998 can be a gap or Leu or Thr
  Misc_feature (999)..(999): location 999 can be Asn or a gap
  Misc_feature (1000)..(1000): location 1000 can be Asn or Ile or a gap or Val or Lys
  Misc_feature (1001)..(1001): location 1001 can be a gap or Ala or Phe or Ser or Thr
  Misc_feature (1002)..(1002): location 1002 can be Val or a gap or Ser or Thr
  Misc_feature (1003)..(1003): location 1003 can be a gap or Lys or Gln or Arg
  Misc_feature (1004)..(1004): location 1004 can be a gap or Lys or Ser
  Misc_feature (1005)..(1005): location 1005 can be Val or a gap or Ala or Ser
  Misc_feature (1006)..(1006): location 1006 can be a gap or Arg or Met
  Misc_feature (1007)..(1007): location 1007 can be a gap or Leu or Arg
  Misc_feature (1008)..(1008): location 1008 can be Val or a gap or Ala or Gly
  Misc_feature (1009)..(1009): location 1009 can be a gap or Pro
  Misc_feature (1010)..(1010): location 1010 can be Val or a gap or Gly
  Misc_feature (1011)..(1011): location 1011 can be a gap or Asp or Glu or Arg
  Misc_feature (1012)..(1012): location 1012 can be Asn or a gap or Val or Ala or Thr
  Misc_feature (1013)..(1013): location 1013 can be a gap or Gln or Ser
  Misc_feature (1014)..(1014): location 1014 can be a gap or Arg or Gly
  Misc_feature (1015)..(1015): location 1015 can be a gap or Asp or Ser
  Misc_feature (1016)..(1016): location 1016 can be Ile or a gap or Tyr or Phe
  Misc_feature (1017)..(1017): location 1017 can be Ile or a gap or Val
  Misc_feature (1018)..(1018): location 1018 can be a gap or Asp or Ala
  Misc_feature (1019)..(1019): location 1019 can be a gap or Glu or Pro
  Misc_feature (1020)..(1020): location 1020 can be a gap or Ala or Arg
  Misc_feature (1021)..(1021): location 1021 can be Ile or a gap
  Misc_feature (1022)..(1022): location 1022 can be Ile or a gap or Val or Arg
  Misc_feature (1023)..(1023): location 1023 can be a gap or Glu
  Misc_feature (1024)..(1024): location 1024 can be a gap or His
  Misc_feature (1025)..(1025): location 1025 can be Ile or a gap or Val
  Misc_feature (1026)..(1026): location 1026 can be a gap or Ala
  Misc_feature (1027)..(1027): location 1027 can be a gap or Ala or Ser
  Misc_feature (1028)..(1028): location 1028 can be Ile or a gap or Val or Ala or Thr
  Misc_feature (1029)..(1029): location 1029 can be a gap or Leu
  Misc_feature (1030)..(1030): location 1030 can be a gap or Ser or Gly
  Misc_feature (1031)..(1031): location 1031 can be a gap or Val or Ala or Leu or Thr
  Misc_feature (1032)..(1032): location 1032 can be a gap or Asp or Ala
  Misc_feature (1033)..(1033): location 1033 can be a gap or Val or Ala or Thr
  Misc_feature (1034)..(1034): location 1034 can be Asn or a gap
  Misc_feature (1035)..(1035): location 1035 can be a gap or Leu or Ala or Thr
  Misc_feature (1036)..(1036): location 1036 can be Ile or a gap or Val
  Misc_feature (1037)..(1037): location 1037 can be a gap or Arg
  Misc_feature (1038)..(1038): location 1038 can be a gap or Gln or Arg
  Misc_feature (1039)..(1039): location 1039 can be a gap or Lys or Arg
  Misc_feature (1040)..(1040): location 1040 can be Asn or a gap
  Misc_feature (1041)..(1041): location 1041 can be a gap or Leu or Phe
  Misc_feature (1042)..(1042): location 1042 can be a gap or His
  Misc_feature (1043)..(1043): location 1043 can be a gap or Asp or Ser or Thr
  Misc_feature (1044)..(1044): location 1044 can be Tyr or a gap or Val or Leu or Phe
  Misc_feature (1045)..(1045): location 1045 can be a gap or Asp or Glu
  Misc_feature (1046)..(1046): location 1046 can be a gap or Ser
  Misc_feature (1047)..(1047): location 1047 can be a gap or Leu
  Misc_feature (1048)..(1048): location 1048 can be Val or a gap or Lys or Ser or Thr
  Misc_feature (1049)..(1049): location 1049 can be a gap or Val or Lys or Leu
  Misc_feature (1050)..(1050): location 1050 can be a gap or Tyr or Phe
  Misc_feature (1051)..(1051): location 1051 can be a gap or Tyr or Phe or His
  Misc_feature (1052)..(1052): location 1052 can be a gap or Pro or Ser or Gly
  Misc_feature (1053)..(1053): location 1053 can be Asn or a gap or Asp
  Misc_feature (1054)..(1054): location 1054 can be a gap or Ala or Ser
  Misc_feature (1055)..(1055): location 1055 can be a gap or Ala
  Misc_feature (1056)..(1056): location 1056 can be a gap or Asp or Glu or Ala or Gly
  Misc_feature (1057)..(1057): location 1057 can be a gap or Ser or Gly or Cys
  Misc_feature (1058)..(1058): location 1058 can be a gap or Glu or Ala or Met
  Misc_feature (1059)..(1059): location 1059 can be a gap or Glu or Ala or Gly
  Misc_feature (1060)..(1060): location 1060 can be a gap or Asp or Glu or Ser
  Misc_feature (1061)..(1061): location 1061 can be a gap or Ala or Pro or Ser or Thr
  Misc_feature (1062)..(1062): location 1062 can be a gap or Pro or Leu or Ser
  Misc_feature (1063)..(1063): location 1063 can be a gap or Ser or Gly or Thr
  Misc_feature (1064)..(1064): location 1064 can be a gap or Tyr
  Misc_feature (1065)..(1065): location 1065 can be a gap or Ser or Thr
  Misc_feature (1066)..(1066): location 1066 can be a gap or Leu
  Misc_feature (1067)..(1067): location 1067 can be Ile or a gap or Val or Pro or His
  Misc_feature (1068)..(1068): location 1068 can be Ile or a gap or Asp or Ser or Thr
  Misc_feature (1069)..(1069): location 1069 can be Ile or a gap
  Misc_feature (1070)..(1070): location 1070 can be a gap or Phe or Cys
  Misc_feature (1071)..(1071): location 1071 can be Asn or a gap or Asp
  Misc_feature (1072)..(1072): location 1072 can be a gap or Lys or Gln or Arg
  Misc_feature (1073)..(1073): location 1073 can be a gap or Leu
  Misc_feature (1074)..(1074): location 1074 can be Ile or a gap or Ala
  Misc_feature (1075)..(1075): location 1075 can be a gap or Ser or Thr
  Misc_feature (1076)..(1076): location 1076 can be a gap or Ser or Thr
  Misc_feature (1077)..(1077): location 1077 can be a gap or Ala or Pro or Ser
  Misc_feature (1078)..(1078): location 1078 can be Asn or a gap or Glu or Arg
  Misc_feature (1079)..(1079): location 1079 can be a gap or Tyr
  Misc_feature (1080)..(1080): location 1080 can be a gap or Leu or Gln or Arg
  Misc_feature (1081)..(1081): location 1081 can be a gap or Gln or Ser or Arg or His
  Misc_feature (1082)..(1082): location 1082 can be a gap or Gln or Arg
  Misc_feature (1083)..(1083): location 1083 can be Val or a gap or Leu or Ala
  Misc_feature (1084)..(1084): location 1084 can be a gap or Glu or Ala
  Misc_feature (1085)..(1085): location 1085 can be Val or a gap or Ala or Ser or Met
  Misc_feature (1086)..(1086): location 1086 can be Ile or a gap or Val
  Misc_feature (1087)..(1087): location 1087 can be a gap or Lys or Glu or Arg
  Misc_feature (1088)..(1088): location 1088 can be a gap or Lys or Gln or Arg or Ser or His
  Misc_feature (1089)..(1089): location 1089 can be a gap or Phe
  Misc_feature (1090)..(1090): location 1090 can be Asn or a gap
  Misc_feature (1091)..(1091): location 1091 can be a gap or Lys or Ala or Ser or Gly
  Misc_feature (1092)..(1092): location 1092 can be a gap or Ser or Thr or Gly
  Misc_feature (1093)..(1093): location 1093 can be Asn or a gap or Ser
  Misc_feature (1094)..(1094): location 1094 can be a gap or Lys or Arg
  Misc_feature (1095)..(1095): location 1095 can be a gap or Trp
  Misc_feature (1096)..(1096): location 1096 can be a gap or Lys or Arg
  Misc_feature (1097)..(1097): location 1097 can be a gap or Lys
  Misc_feature (1098)..(1098): location 1098 can be a gap or Arg
  Misc_feature (1099)..(1099): location 1099 can be a gap or Gly
  Misc_feature (1100)..(1100): location 1100 can be Ile or a gap or Leu
  Misc_feature (1101)..(1101): location 1101 can be a gap or Ser
  Misc_feature (1102)..(1102): location 1102 can be a gap or Val or Ser or Cys
  Misc_feature (1103)..(1103): location 1103 can be a gap or Val
  Misc_feature (1104)..(1104): location 1104 can be a gap or Pro
  Misc_feature (1105)..(1105): location 1105 can be Ile or a gap or Leu
  Misc_feature (1106)..(1106): location 1106 can be Ile or a gap or Val or Thr
  Misc_feature (1107)..(1107): location 1107 can be a gap or Tyr or Phe or His
  Misc_feature (1108)..(1108): location 1108 can be a gap or Lys or Asp or Glu or Ser
  Misc_feature (1109)..(1109): location 1109 can be a gap or Val or Phe
  Misc_feature (1110)..(1110): location 1110 can be a gap or Glu or Ala or Arg or Thr
  Misc_feature (1111)..(1111): location 1111 can be a gap or Pro or Leu or Ser
  Misc_feature (1112)..(1112): location 1112 can be a gap or Arg
  Misc_feature (1113)..(1113): location 1113 can be a gap or Pro
  Misc_feature (1114)..(1114): location 1114 can be a gap or Ala or Ser or Thr
  Misc_feature (1115)..(1115): location 1115 can be a gap or Pro
  Misc_feature (1116)..(1116): location 1116 can be a gap or Gly
  Misc_feature (1117)..(1117): location 1117 can be a gap or Lys or Arg
  Misc_feature (1118)..(1118): location 1118 can be a gap or Val
  Misc_feature (1119)..(1119): location 1119 can be a gap or Ser
  Misc_feature (1120)..(1120): location 1120 can be Ile or Val or a gap
  Misc_feature (1121)..(1121): location 1121 can be a gap or Leu or Met
  Misc_feature (1122)..(1122): location 1122 can be Asn or a gap
  Misc_feature (1123)..(1123): location 1123 can be a gap or Asp
  Misc_feature (1124)..(1124): location 1124 can be a gap or Gly
  Misc_feature (1125)..(1125): location 1125 can be a gap or Ser
  Misc_feature (1126)..(1126): location 1126 can be Ile or a gap or Val
  Misc_feature (1127)..(1127): location 1127 can be Val or a gap or Ala
  Misc_feature (1128)..(1128): location 1128 can be a gap or Val
  Misc_feature (1129)..(1129): location 1129 can be a gap or Glu
  Misc_feature (1130)..(1130): location 1130 can be a gap or Val
  Misc_feature (1131)..(1131): location 1131 can be a gap or Gly
  Misc_feature (1132)..(1132): location 1132 can be a gap or Gly
  Misc_feature (1133)..(1133): location 1133 can be Ile or a gap or Val
  Misc_feature (1134)..(1134): location 1134 can be a gap or Glu
  Misc_feature (1135)..(1135): location 1135 can be Ile or a gap or Leu
  Misc_feature (1136)..(1136): location 1136 can be a gap or Gly
  Misc_feature (1137)..(1137): location 1137 can be a gap or Gln
  Misc_feature (1138)..(1138): location 1138 can be a gap or Gly
  Misc_feature (1139)..(1139): location 1139 can be a gap or Leu
  Misc_feature (1140)..(1140): location 1140 can be Tyr or a gap or Trp
  Misc_feature (1141)..(1141): location 1141 can be a gap or Thr
  Misc_feature (1142)..(1142): location 1142 can be a gap or Lys
  Misc_feature (1143)..(1143): location 1143 can be a gap or Val
  Misc_feature (1144)..(1144): location 1144 can be a gap or Lys or Gln
  Misc_feature (1145)..(1145): location 1145 can be a gap or Gln
  Misc_feature (1146)..(1146): location 1146 can be a gap or Met
  Misc_feature (1147)..(1147): location 1147 can be a gap or Ala or Thr
  Misc_feature (1148)..(1148): location 1148 can be a gap or Ala
  Misc_feature (1149)..(1149): location 1149 can be a gap or Phe
  Misc_feature (1150)..(1150): location 1150 can be a gap or Ala or Gly
  Misc_feature (1151)..(1151): location 1151 can be a gap or Leu
  Misc_feature (1152)..(1152): location 1152 can be a gap or Arg or Gly
  Misc_feature (1153)..(1153): location 1153 can be a gap or Glu or Gln
  Misc_feature (1154)..(1154): location 1154 can be a gap or Leu
  Misc_feature (1155)..(1155): location 1155 can be a gap or Trp or Cys
  Misc_feature (1156)..(1156): location 1156 can be a gap or Asp or Pro or Thr
  Misc_feature (1157)..(1157): location 1157 can be a gap or Lys or Asp
  Misc_feature (1158)..(1158): location 1158 can be a gap or Ala or Arg or Gly
  Misc_feature (1159)..(1159): location 1159 can be a gap or Asp or Arg or Cys or Gly
  Misc_feature (1160)..(1160): location 1160 can be a gap or Glu or Gln or Gly
  Misc_feature (1161)..(1161): location 1161 can be a gap or Glu or Gly
  Misc_feature (1162)..(1162): location 1162 can be a gap or Leu
  Misc_feature (1163)..(1163): location 1163 can be Ile or a gap or Leu
  Misc_feature (1164)..(1164): location 1164 can be a gap or Asp or Glu
  Misc_feature (1165)..(1165): location 1165 can be Asn or a gap or Lys or Arg
  Misc_feature (1166)..(1166): location 1166 can be Ile or a gap or Val
  Misc_feature (1167)..(1167): location 1167 can be a gap or Arg
  Misc_feature (1168)..(1168): location 1168 can be Ile or a gap or Val
  Misc_feature (1169)..(1169): location 1169 can be Ile or a gap or Leu
  Misc_feature (1170)..(1170): location 1170 can be a gap or Gln
  Misc_feature (1171)..(1171): location 1171 can be a gap or Ala or Ser
  Misc_feature (1172)..(1172): location 1172 can be a gap or Asp
  Misc_feature (1173)..(1173): location 1173 can be a gap or Thr
  Misc_feature (1174)..(1174): location 1174 can be a gap or Leu
  Misc_feature (1175)..(1175): location 1175 can be Asn or a gap or Ser
  Misc_feature (1176)..(1176): location 1176 can be a gap or Val or Leu or Met
  Misc_feature (1177)..(1177): location 1177 can be Ile or a gap
  Misc_feature (1178)..(1178): location 1178 can be a gap or Gln
  Misc_feature (1179)..(1179): location 1179 can be a gap or Gly
  Misc_feature (1180)..(1180): location 1180 can be a gap or Ser or Gly
  Misc_feature (1181)..(1181): location 1181 can be a gap or Trp or Leu or Phe
  Misc_feature (1182)..(1182): location 1182 can be a gap or Thr
  Misc_feature (1183)..(1183): location 1183 can be a gap or Ala or Thr or Gly
  Misc_feature (1184)..(1184): location 1184 can be a gap or Gly
  Misc_feature (1185)..(1185): location 1185 can be a gap or Ser
  Misc_feature (1186)..(1186): location 1186 can be a gap or Thr
  Misc_feature (1187)..(1187): location 1187 can be a gap or Thr
  Misc_feature (1188)..(1188): location 1188 can be a gap or Ser
  Misc_feature (1189)..(1189): location 1189 can be a gap or Glu
  Misc_feature (1190)..(1190): location 1190 can be a gap or Ser or Thr
  Misc_feature (1191)..(1191): location 1191 can be a gap or Ser
  Misc_feature (1192)..(1192): location 1192 can be a gap or Cys
  Misc_feature (1193)..(1193): location 1193 can be a gap or Glu or Ala
  Misc_feature (1194)..(1194): location 1194 can be a gap or Ala
  Misc_feature (1195)..(1195): location 1195 can be a gap or Val or Thr
  Misc_feature (1196)..(1196): location 1196 can be a gap or Leu or His or Arg
  Misc_feature (1197)..(1197): location 1197 can be a gap or Lys or Gln or Arg
  Misc_feature (1198)..(1198): location 1198 can be a gap or Ala or Ser
  Misc_feature (1199)..(1199): location 1199 can be a gap or Cys
  Misc_feature (1200)..(1200): location 1200 can be Asn or a gap or Ala or Thr
  Misc_feature (1201)..(1201): location 1201 can be Ile or Val or a gap or Ala or Met
  Misc_feature (1202)..(1202): location 1202 can be a gap or Leu
  Misc_feature (1203)..(1203): location 1203 can be Ile or a gap or Val or Phe
  Misc_feature (1204)..(1204): location 1204 can be a gap or Asp or Glu
  Misc_feature (1205)..(1205): location 1205 can be a gap or Arg
  Misc_feature (1206)..(1206): location 1206 can be a gap or Leu
  Misc_feature (1207)..(1207): location 1207 can be a gap or Lys
  Misc_feature (1208)..(1208): location 1208 can be a gap or Pro
  Misc_feature (1209)..(1209): location 1209 can be Ile or Val or a gap or Leu
  Misc_feature (1210)..(1210): location 1210 can be a gap or Lys or Met
  Misc_feature (1211)..(1211): location 1211 can be a gap or Asp or Glu
  Misc_feature (1212)..(1212): location 1212 can be a gap or Lys or Gln or Ser or Arg
  Misc_feature (1213)..(1213): location 1213 can be a gap or Leu or Ala
  Misc_feature (1214)..(1214): location 1214 can be a gap or Glu or Gln or Gly
  Misc_feature (1215)..(1215): location 1215 can be a gap or Glu or Ala or Leu or Thr
  Misc_feature (1216)..(1216): location 1216 can be a gap or Lys or Leu or Gln or Pro or Gly
  Misc_feature (1217)..(1217): location 1217 can be a gap or Pro
  Misc_feature (1218)..(1218): location 1218 can be a gap or Trp or Gly
  Misc_feature (1219)..(1219): location 1219 can be a gap or Lys or Ala or Gln or Ser
  Misc_feature (1220)..(1220): location 1220 can be a gap or Asp or Ala or Ser or Gly
  Misc_feature (1221)..(1221): location 1221 can be a gap or Ala or Leu or Phe or Thr
  Misc_feature (1222)..(1222): location 1222 can be Ile or a gap or Val or Pro
  Misc_feature (1223)..(1223): location 1223 can be Trp or a gap or Ala or Ser
  Misc_feature (1224)..(1224): location 1224 can be a gap or Trp or Gln or Ser
  Misc_feature (1225)..(1225): location 1225 can be a gap or Asp or Ala
  Misc_feature (1226)..(1226): location 1226 can be a gap or Glu or Leu or Ser or Thr
  Misc_feature (1227)..(1227): location 1227 can be Ile or a gap or Leu or Met
  Misc_feature (1228)..(1228): location 1228 can be Ile or a gap or Ala
  Misc_feature (1229)..(1229): location 1229 can be a gap or Gln or Ser
  Misc_feature (1230)..(1230): location 1230 can be a gap or Val or Ala or Gln
  Misc_feature (1231)..(1231): location 1231 can be a gap or Lys or Ala
  Misc_feature (1232)..(1232): location 1232 can be a gap or Lys or Leu or Met or Ser
  Misc_feature (1233)..(1233): location 1233 can be a gap or Ala or Gln or Met or Thr
  Misc_feature (1234)..(1234): location 1234 can be a gap or Val or Glu or Ser
  Misc_feature (1235)..(1235): location 1235 can be Asn or Val or a gap or His or Gly
  Misc_feature (1236)..(1236): location 1236 can be Asn or Ile or a gap or Val or Ala
  Misc_feature (1237)..(1237): location 1237 can be Asn or a gap or Tyr or Asp or Leu
  Misc_feature (1238)..(1238): location 1238 can be a gap or Trp or Leu or Ser
  Misc_feature (1239)..(1239): location 1239 can be a gap or Ala or Ser or Thr
  Misc_feature (1240)..(1240): location 1240 can be a gap or Ala or Pro or His
  Misc_feature (1241)..(1241): location 1241 can be a gap or Lys or Asp or Ala or Ser
  Misc_feature (1242)..(1242): location 1242 can be Tyr or a gap or Glu or Ala or Pro
  Misc_feature (1243)..(1243): location 1243 can be Trp or Tyr or a gap or Leu or Thr
  Misc_feature (1244)..(1244): location 1244 can be Trp or a gap or Tyr or Lys or Phe
  Misc_feature (1245)..(1245): location 1245 can be a gap or Val or Pro or Thr
  Misc_feature (1246)..(1246): location 1246 can be a gap or Pro or Ser or Gly
  Misc_feature (1247)..(1247): location 1247 can be a gap or Tyr or Glu or Pro or Gly
  Misc_feature (1248)..(1248): location 1248 can be a gap or Ala or Gln or Leu or Met
  Misc_feature (1249)..(1249): location 1249 can be Asn or a gap or Asp or Ala or Phe
  Misc_feature (1250)..(1250): location 1250 can be a gap or Arg or Ser
  Misc_feature (1251)..(1251): location 1251 can be a gap or Asn or Lys or Gly
  Misc_feature (1252)..(1252): location 1252 can be a gap or Ile or Phe or Ser
  Misc_feature (1253)..(1253): location 1253 can be a gap or Tyr or His
  Misc_feature (1254)..(1254): location 1254 can be a gap or Pro or Leu
  Misc_feature (1255)..(1255): location 1255 can be a gap or Asn or Pro
  Misc_feature (1256)..(1256): location 1256 can be a gap or Tyr or Thr
  Misc_feature (1257)..(1257): location 1257 can be a gap or Gly
  Misc_feature (1258)..(1258): location 1258 can be a gap or Ala
  Misc_feature (1259)..(1259): location 1259 can be a gap or Ala or Gly
  Misc_feature (1260)..(1260): location 1260 can be Ile or Val or a gap or Ala or Thr
  Misc_feature (1261)..(1261): location 1261 can be a gap or Ser
  Misc_feature (1262)..(1262): location 1262 can be a gap or Glu
  Misc_feature (1263)..(1263): location 1263 can be a gap or Val
  Misc_feature (1264)..(1264): location 1264 can be a gap or Glu
  Misc_feature (1265)..(1265): location 1265 can be Ile or a gap or Val
  Misc_feature (1266)..(1266): location 1266 can be a gap or Asp
  Misc_feature (1267)..(1267): location 1267 can be a gap or Val or Leu
  Misc_feature (1268)..(1268): location 1268 can be a gap or Leu
  Misc_feature (1269)..(1269): location 1269 can be a gap or Thr
  Misc_feature (1270)..(1270): location 1270 can be a gap or Gly
  Misc_feature (1271)..(1271): location 1271 can be a gap or Glu or Ala
  Misc_feature (1272)..(1272): location 1272 can be Ile or a gap or Thr
  Misc_feature (1273)..(1273): location 1273 can be a gap or Thr
  Misc_feature (1274)..(1274): location 1274 can be Ile or a gap
  Misc_feature (1275)..(1275): location 1275 can be Ile or a gap or Leu or Met
  Misc_feature (1276)..(1276): location 1276 can be a gap or Gln or Arg
  Misc_feature (1277)..(1277): location 1277 can be a gap or Ser or Thr
  Misc_feature (1278)..(1278): location 1278 can be a gap or Asp
  Misc_feature (1279)..(1279): location 1279 can be Ile or a gap or Leu
  Misc_feature (1280)..(1280): location 1280 can be Ile or a gap or Val or Leu
  Misc_feature (1281)..(1281): location 1281 can be a gap or Tyr
  Misc_feature (1282)..(1282): location 1282 can be a gap or Asp
  Misc_feature (1283)..(1283): location 1283 can be a gap or Ser or Cys
  Misc_feature (1284)..(1284): location 1284 can be a gap or Gly
  Misc_feature (1285)..(1285): location 1285 can be a gap or Lys or Gln or Arg
  Misc_feature (1286)..(1286): location 1286 can be a gap or Ser
  Misc_feature (1287)..(1287): location 1287 can be a gap or Leu
  Misc_feature (1288)..(1288): location 1288 can be Asn or a gap
  Misc_feature (1289)..(1289): location 1289 can be a gap or Pro
  Misc_feature (1290)..(1290): location 1290 can be a gap or Ala
  Misc_feature (1291)..(1291): location 1291 can be a gap or Val
  Misc_feature (1292)..(1292): location 1292 can be a gap or Asp
  Misc_feature (1293)..(1293): location 1293 can be a gap or Leu
  Misc_feature (1294)..(1294): location 1294 can be a gap or Gly
  Misc_feature (1295)..(1295): location 1295 can be a gap or Gln
  Misc_feature (1296)..(1296): location 1296 can be Ile or a gap or Val
  Misc_feature (1297)..(1297): location 1297 can be a gap or Glu
  Misc_feature (1298)..(1298): location 1298 can be a gap or Ser or Gly
  Misc_feature (1299)..(1299): location 1299 can be a gap or Ala or Ser
  Misc_feature (1300)..(1300): location 1300 can be a gap or Phe
  Misc_feature (1301)..(1301): location 1301 can be Ile or a gap or Val
  Misc_feature (1302)..(1302): location 1302 can be a gap or Gln
  Misc_feature (1303)..(1303): location 1303 can be a gap or Gly
  Misc_feature (1304)..(1304): location 1304 can be Ile or a gap or Val or Leu
  Misc_feature (1305)..(1305): location 1305 can be a gap or Xaa or Gly
  Misc_feature (1306)..(1306): location 1306 can be a gap or Tyr or Phe
  Misc_feature (1307)..(1307): location 1307 can be a gap or Phe
  Misc_feature (1308)..(1308): location 1308 can be Ile or a gap or Met or Thr
  Misc_feature (1309)..(1309): location 1309 can be Asn or Tyr or a gap or Leu
  Misc_feature (1310)..(1310): location 1310 can be a gap or Glu
  Misc_feature (1311)..(1311): location 1311 can be a gap or Asp or Glu
  Misc_feature (1312)..(1312): location 1312 can be a gap or Tyr or His
  Misc_feature (1313)..(1313): location 1313 can be Ile or a gap or Val or Gln or Ala or Thr
  Misc_feature (1314)..(1314): location 1314 can be a gap or Thr
  Misc_feature (1315)..(1315): location 1315 can be Asn or a gap or Asp
  Misc_feature (1316)..(1316): location 1316 can be a gap or Ala or Ser
  Misc_feature (1317)..(1317): location 1317 can be a gap or Asp or Glu
  Misc_feature (1318)..(1318): location 1318 can be a gap or Gly
  Misc_feature (1319)..(1319): location 1319 can be a gap or Leu
  Misc_feature (1320)..(1320): location 1320 can be a gap or Val or Leu or Arg
  Misc_feature (1321)..(1321): location 1321 can be Ile or a gap or Val or Leu
  Misc_feature (1322)..(1322): location 1322 can be Asn or a gap or His or Ser or Thr
  Misc_feature (1323)..(1323): location 1323 can be Asn or a gap or Asp
  Misc_feature (1324)..(1324): location 1324 can be a gap or Ser or Gly
  Misc_feature (1325)..(1325): location 1325 can be a gap or Thr
  Misc_feature (1326)..(1326): location 1326 can be a gap or Trp
  Misc_feature (1327)..(1327): location 1327 can be a gap or Asp or Thr
  Misc_feature (1328)..(1328): location 1328 can be a gap or Tyr
  Misc_feature (1329)..(1329): location 1329 can be a gap or Lys
  Misc_feature (1330)..(1330): location 1330 can be Ile or a gap
  Misc_feature (1331)..(1331): location 1331 can be a gap or Pro
  Misc_feature (1332)..(1332): location 1332 can be a gap or Ser or Thr
  Misc_feature (1333)..(1333): location 1333 can be a gap or Val
  Misc_feature (1334)..(1334): location 1334 can be a gap or Asp
  Misc_feature (1335)..(1335): location 1335 can be a gap or Thr
  Misc_feature (1336)..(1336): location 1336 can be Ile or a gap
  Misc_feature (1337)..(1337): location 1337 can be a gap or Pro
  Misc_feature (1338)..(1338): location 1338 can be a gap or Lys or Arg
  Misc_feature (1339)..(1339): location 1339 can be a gap or Gln
  Misc_feature (1340)..(1340): location 1340 can be a gap or Phe
  Misc_feature (1341)..(1341): location 1341 can be Asn or a gap
  Misc_feature (1342)..(1342): location 1342 can be a gap or Val or Ala
  Misc_feature (1343)..(1343): location 1343 can be a gap or Lys or Glu
  Misc_feature (1344)..(1344): location 1344 can be Ile or Val or a gap or Leu
  Misc_feature (1345)..(1345): location 1345 can be Ile or a gap or Leu
  Misc_feature (1346)..(1346): location 1346 can be Asn or a gap or Ser
  Misc_feature (1347)..(1347): location 1347 can be a gap or Ser or Thr
  Misc_feature (1348)..(1348): location 1348 can be a gap or Ala or Gly
  Misc_feature (1349)..(1349): location 1349 can be Tyr or a gap or Phe or His or Arg
  Misc_feature (1350)..(1350): location 1350 can be a gap or Asp or Glu or His
  Misc_feature (1351)..(1351): location 1351 can be Asn or a gap or Lys or Glu or Gln or His
  Misc_feature (1352)..(1352): location 1352 can be a gap or Lys or Ser or His
  Misc_feature (1353)..(1353): location 1353 can be a gap or Arg or Gly
  Misc_feature (1354)..(1354): location 1354 can be a gap or Val
  Misc_feature (1355)..(1355): location 1355 can be a gap or Leu
  Misc_feature (1356)..(1356): location 1356 can be a gap or Ser
  Misc_feature (1357)..(1357): location 1357 can be a gap or Ser
  Misc_feature (1358)..(1358): location 1358 can be a gap or Lys
  Misc_feature (1359)..(1359): location 1359 can be a gap or Ala or Gly
  Misc_feature (1360)..(1360): location 1360 can be a gap or Ser
  Misc_feature (1361)..(1361): location 1361 can be a gap or Gly
  Misc_feature (1362)..(1362): location 1362 can be a gap or Lys or Glu
  Misc_feature (1363)..(1363): location 1363 can be a gap or Pro
  Misc_feature (1364)..(1364): location 1364 can be a gap or Ala or Pro
  Misc_feature (1365)..(1365): location 1365 can be Val or a gap or Leu
  Misc_feature (1366)..(1366): location 1366 can be Val or a gap or Leu
  Misc_feature (1367)..(1367): location 1367 can be a gap or Leu
  Misc_feature (1368)..(1368): location 1368 can be a gap or Ala or Gly
  Misc_feature (1369)..(1369): location 1369 can be a gap or Leu or Ala or Ser
  Misc_feature (1370)..(1370): location 1370 can be a gap or Ser
  Misc_feature (1371)..(1371): location 1371 can be a gap or Val
  Misc_feature (1372)..(1372): location 1372 can be a gap or His
  Misc_feature (1373)..(1373): location 1373 can be a gap or Cys
  Misc_feature (1374)..(1374): location 1374 can be a gap or Pro or Ala
  Misc_feature (1375)..(1375): location 1375 can be Ile or Val or Met or Thr
  Misc_feature (1379)..(1379): location 1379 can be Ile or Val
  Misc_feature (1380)..(1380): location 1380 can be Lys or Arg
  Misc_feature (1381)..(1381): location 1381 can be Glu or Ala
  Misc_feature (1384)..(1384): location 1384 can be Ile or Lys or Glu or Arg or Thr
  Misc_feature (1385)..(1385): location 1385 can be Asp or Glu or Gln
  Misc_feature (1386)..(1386): location 1386 can be Tyr or Leu or Phe
  Misc_feature (1387)..(1387): location 1387 can be Pro or Ala or Arg or Ser or His
  Misc_feature (1388)..(1388): location 1388 can be Val or Ala or Met or Cys or Gly
  Misc_feature (1389)..(1389): location 1389 can be Asn or Trp or Val or Ala or Ser or Cys
  Misc_feature (1390)..(1390): location 1390 can be Asn or Lys or Ser or Arg or Thr or Gly
  Misc_feature (1391)..(1391): location 1391 can be a gap or Gly
  Misc_feature (1392)..(1392): location 1392 can be a gap or Pro or Gly
  Misc_feature (1393)..(1393): location 1393 can be a gap or Thr
  Misc_feature (1394)..(1394): location 1394 can be a gap or Gly
  Misc_feature (1395)..(1395): location 1395 can be Val or a gap or Ser or Gly
  Misc_feature (1396)..(1396): location 1396 can be Asn or a gap or Ala or Ser or Gly
  Misc_feature (1397)..(1397): location 1397 can be Asn or a gap or Asp or Ser
  Misc_feature (1398)..(1398): location 1398 can be a gap or Gln or Phe or Ser
  Misc_feature (1399)..(1399): location 1399 can be Val or Glu or Leu or Ala or Pro or Ser or Thr
  Misc_feature (1400)..(1400): location 1400 can be Ile or Pro or Leu or Thr
  Misc_feature (1401)..(1401): location 1401 can be Phe or Met or Ser or Thr
  Misc_feature (1403)..(1403): location 1403 can be Asp or Gln
  Misc_feature (1404)..(1404): location 1404 can be Leu or Met
  Misc_feature (1405)..(1405): location 1405 can be Asp or Glu or Pro
  Misc_feature (1409)..(1409): location 1409 can be Ile or Pro or Thr
  Misc_feature (1411)..(1411): location 1411 can be Ala or Pro or Thr
  Misc_feature (1412)..(1412): location 1412 can be Ile or Val or Asp or Ala or Thr
  Misc_feature (1413)..(1413): location 1413 can be Ile or Val
  Misc_feature (1421)..(1421): location 1421 can be Ile or Asn or Val
  Misc_feature (1424)..(1424): location 1424 can be Lys or Ser or Arg
  Misc_feature (1425)..(1425): location 1425 can be Tyr or Asp or His
  Misc_feature (1426)..(1426): location 1426 can be Leu or Phe
  Misc_feature (1427)..(1427): location 1427 can be Glu or Gln
  Misc_feature (1428)..(1428): location 1428 can be Trp or Asp or Ser
  Misc_feature (1429)..(1429): location 1429 can be Ile or Val or Pro or Leu or Phe or Met
  Misc_feature (1430)..(1430): location 1430 can be Pro or Ala or Ser or Cys
  Misc_feature (1431)..(1431): location 1431 can be Asn or Ala or Ser
  Misc_feature (1432)..(1432): location 1432 can be Val or Lys or Ala or Arg or Thr
  Misc_feature (1433)..(1433): location 1433 can be Asn or a gap or Ala or Ser or Thr or Gly
  Misc_feature (1434)..(1434): location 1434 can be a gap or Glu or Ala or Pro
  Misc_feature (1435)..(1435): location 1435 can be Val or a gap or Ala or Thr
  Misc_feature (1436)..(1436): location 1436 can be Asn or a gap or Ala or Pro or Ser
  Misc_feature (1437)..(1437): location 1437 can be a gap or Gly or Thr
  Misc_feature (1438)..(1438): location 1438 can be Asn or a gap or Ala or Pro
  Misc_feature (1439)..(1439): location 1439 can be Val or a gap or Lys or Gln
  Misc_feature (1440)..(1440): location 1440 can be a gap or Ala
XXXXXXXXXXXXXXXXXXXXXXXXXXXXXXXXXXXXXXXXXXXXXXXXXXXXXXXXXXXXXXXXXXXXXXXXXXXXXXXXXXXXXXXXXXXXXXXXXXXXXXXXXXXXXXXXXXXXXXXXXXXXXXXXXXXXXXXXXXXXXXXXXXXXXXXXXXXXXXXXXXXXXXXXXXXXXXXXXXXXXXXXXXXXXXXXXXXXXXXXXXXXXXXXXXXXXXXXXXXXXXXXXXXXXXXXXXXXXXXXXXXXXXXXXXXXXXXXXXXXXXXXXXXXXXXXXXXXXXXXXXXXXXXXXXXXXXXXXXXXXXXXXXXXXXXXXXXXXXXXXXXXXXXXXXXXXXXXXXXXXXXXXXXXXXXXXXXXXXXXXXXXXXXXXXXXXXXXXXXXXXXXXXXXXXXXXXXXXXXXXXXXXXXXXXXXXXXXXXXXXXXXXXXXXXXXXXXXXXXXXXXXXXXXXXXXXXXXXXXXXXXXXXXXXXXXXXXXXXXXXXXXXXXXXXXXXXXXXXXXXXXXXXXXXXXXXXXXXXXXXXXXXXXXXXXXXXXXXXXXXXXXXXXXXXXXXXXXXXXXXXXXXXXXXXXXXXXXXXXXXXXXXXXXXXXXXXXXXXXXXXXXXXXXXXXXXXXXXXXXXXXXXXXXXXXXXXXXXXXXXXXXXXXXXXXXXXXXXXXXXXXXXXXXXXXXXXXXXXXXXXXXXXXXXXXXXXXXXXXXXXXXXXXXXXXXXXXXXXXXXXXXXXXXXXXXXXXXXXXXXXXXXXXXXXXXXXXXXXXXXXXXXXXXXXXXXXXXXXXXXXXXXXXXXXXXXXXXXXXXXXXXXXXXXXXXXXXXXXXXXXXXXXXXXXXXXXXXXXXXXXXXXXXXXXXXXXXXXXXXXXXXXXXXXXXXXXXXXXXXXXXXXXXXXXXXXXXXXXXXXXXXXXXXXXXXXXXXXXXXXXXXXXXXXXXXXXXXXXXXXXXXXXXXXXXXXXXXXXXXXXXXXXXXXXXXXXXXXXXXXXXXXXXXXXXXXXXXXXXXXXXXXXXXXXXXXXXXXXXXXXXXXXXXXXXXXXXXXXXXXXXXXXXXXXXXXXXXXXXXXXXXXXXXXXXXXXXXXXXXXXXXXXXXXXXXXXXXXXXXXXXXXXXXXXXXXXXXXXXXXXXXXXXXXXXXXXXXXXXXXXXXXXXXXXXXXXXXXXXXXXXXXXXXXXXXXXXXXXXXXXXXXXXXXXXXXXXXXXXXXXXXXXXXXXXXXXXXXXXXXXXXXXXXXXXXXXXXXXXXXXXXXXXXXXXXXXXXXXXXXXXXXXXXXXXXXXXXXDXXYDXGXSLNPAVDLGQXEGAFXQGXGFFXXEXYXTNXDGLXXXDXTWTYKIPTVDTIPKQFNVEXXXXXXXXKRVLSSKASGEPPLLLAXSVHCAXREAIRAARXEFXXXXGXXXXXXXXXTFQMDVPATMPXVKELCGLDVVEXYLESXXXXXXXXXXXX
